United States Patent Application Publication US 2022/0211063 A1 - sequence listing, part 14

SEQ ID NO: 12 - DNA, 1380001 bp, Penicillium roqueforti
  misc_feature (15000)..(15662): n is a, c, g, or t
  misc_feature (17771)..(18557): n is a, c, g, or t
  misc_feature (101024)..(101242): n is a, c, g, or t
  misc_feature (169632)..(170397): n is a, c, g, or t
  misc_feature (215459)..(215872): n is a, c, g, or t
  misc_feature (219169)..(219484): n is a, c, g, or t
  misc_feature (223162)..(224998): n is a, c, g, or t
  misc_feature (231022)..(231250): n is a, c, g, or t
  misc_feature (337600)..(337732): n is a, c, g, or t
  misc_feature (338203)..(338731): n is a, c, g, or t
  misc_feature (339701)..(339892): n is a, c, g, or t
  misc_feature (370193)..(370202): n is a, c, g, or t
  misc_feature (453203)..(453221): n is a, c, g, or t
  misc_feature (462970)..(462990): n is a, c, g, or t
  misc_feature (468052)..(471945): n is a, c, g, or t
  misc_feature (491983)..(492753): n is a, c, g, or t
  misc_feature (498806)..(503402): n is a, c, g, or t
  misc_feature (507109)..(510346): n is a, c, g, or t
  misc_feature (527685)..(529876): n is a, c, g, or t
  misc_feature (549648)..(549856): n is a, c, g, or t
  misc_feature (582215)..(583107): n is a, c, g, or t
  misc_feature (772485)..(773015): n is a, c, g, or t
  misc_feature (797127)..(797333): n is a, c, g, or t
  misc_feature (799196)..(800295): n is a, c, g, or t
  misc_feature (833062)..(833209): n is a, c, g, or t
  misc_feature (925450)..(925620): n is a, c, g, or t
  misc_feature (993271)..(993463): n is a, c, g, or t
  misc_feature (1022069)..(1022101): n is a, c, g, or t
  misc_feature (1051368)..(1051444): n is a, c, g, or t
  misc_feature (1188410)..(1189048): n is a, c, g, or t
  misc_feature (1191130)..(1191546): n is a, c, g, or t
  misc_feature (1224492)..(1225374): n is a, c, g, or t
  misc_feature (1228908)..(1229259): n is a, c, g, or t
  misc_feature (1328192)..(1328592): n is a, c, g, or t
  misc_feature (1354636)..(1354788): n is a, c, g, or t
  misc_feature (1376086)..(1377523): n is a, c, g, or t
tattttagcgttgaaattgaaattgaaatgatatttttaattttcaagtgattttaacagccctaactttagcacttgaatttgagcccccttgtgatggggctagttcattcatttccattatctcagatttgattgaggctaactatgccactataccttattgttgtcggccccgataggaggattgattggaactcgctacgaacacgaagaaaccccttgaaaattgaaaagttcgcggcgctataattgattctaacctaattgaaataatgccatccacataaatctacaagctccataagccgagctaacctaaccgagttctttggctatggctagatcgcttgctagaacgggctaaattggcgttgactagggaaatgaccacggcccagatcggaaggacggtcaaaaactgagaagtctcgtcattttgtctaaaatcaaaggtcttcctcttggttaccgttggaagttctgccaagagtcttgacacaatgcatcttgggaaagggctctggctagttggtcaaattagccttcttgttcaagcttctcataatcatcatggccaccaccaccaccaccatgcgagatcccatgacctgcacatacccgagagtgcttctcatgtgtctggatcagttcatgcagtgacttcaagtggtccatatgcagctggggaaacctctgacgcagctgatgccgttgcacgggctctcaaagtcttgaaacagagaaacaagcttcgccttgagaatgtccagcacaacaactacaagttaagagctttctctgacaagagctctgatcccaattctcgtcccctggactacagcccgaaggctgcagaaacctcgacggattccaacaaccagaccatccgcagatcatccgacacaaaagagaattatggatactcaattcccccggaactcagagaggctgctcgaatccttgccgagtcaacacccccatctccatcgacaggaaaccatagtgctgtggcggccttgatgcgcgaaaagtatcgtagcgggataagcgacacctccattcctctgcagagctatagaacctacgatggtttatctgatattgtcatgcaaaataaccaatcagtaccttctggaaattctattcctgaggaaggactcggaaagcgagcaagctcaagttggtggatggctacaatggtccaacgtggtgccaatccgtacgcaccatctggttacaaagtatggttgctgtttatcttataacccatcaacataccaaactaacgttatcgaaggtttggagaaatgtcaaagattatggagctaagggtaaagaaaaccgcattctttaacttattctgatttctaattgaaaagtttaggagatggcgttaccgacgacactggttagtccaaaccttttcctttttttccccggctttttcctttcttgggtccctttgctggagcccaggaagttcagacaggaggttaattcattatttctagcggctatcaaccttgctatctcagatgggggccgttgtggtgccagctgcggttcaagcacgatataccctgccgtggtctacttcccgcctggagactacctcgtcagcagtcccatcattcagtattttaacacacagatcctcggtgatgtatgactccccacctgggcaggtgattctcgttcctaggttggaacttaagaaatccctccgttgattatctgcatgtgggctaacctctctgtcagcccatcgacctacccacgattctcggtgcatcaagctttgttggtcttggtgtcattacctctgatgtttacgtcggtgatcaagaagaatggtacattaatacgaacaatttcctccgcagcgttcgcaacttcaagattgatatcacccggacggaccaatcagcctatgtctgcgctattcattggcaagtcgctcagggaacgtctcttgaaaatatctacttctacatgacccaagatgcgcagaccactcagcagggtatttatatggagaacggaagtggcgggttcatggctgacttgacctttgttggtggcaactttgggtaagaataactaaaatgccttgagttcgcctttcatactgatacatgcatttcaatagtgcttaccttggcaaccagcaattcacaaccagtcacttggtgtttgtgaattgcaacaccgcagttcaaatccagtgggactgggcctggacaatgcaggatgttattgttgaaagctgtactaccggtattttgattgtcggaggagtaagtgtcaagataagctgactttgatgaaaaagcaaagcaatgctaacaaggtcctataggcaggtggtccttacagtacagggcagggcgttggctcttttgttttagttgactctctgattgccaacaccgctactggtatcgtcaccacactctacaatgagaactcaactgctttgcttttgcaaaacgttgggttctataacacgcagaccgctattttggataacaacgtgaacaaggctttgatccctggaggcgaccagaccattcttgattcatggggcttcggaatggtcaatgacccagacagtgcacgttttgtttctggcgcgaatttgctcgctatgaacaggtcctcttcgctcgttggtagcaccctttacaataccaagcctaatttcttcacccgtcgtcgtccgaaatatgacgatttggggaattctcaggtgctggacgtcaaggagctcggtgctaagggcgatggcattcacgacgatacgaacgtgctaaactctatcctagccagagctgctaacatgtcgtctattgtatacttaccgcatggtgtttatgttatcaaagacacgctcaacgtccccaaaaactctcgcatcctgggtcaagcatggtctcaaatcatggccacaggcgataaatttgaagatgtgaaaaatccacgtgtcgccgtgaaagttggaaaaaagggtgatgaaggaattgtcgagattcaagatctccttttcaccgtatccgggcccacggcaggtgctgtactagtggagtggaacatacgcgagtcgacacaaggctccgctggactatggggtaaagtctcctagatctattggcgaatctgttacttgatcttcctactgacgtttacttccttacgacagattctcatttccgagttggaggggctaaaggctccaatctacaagcctcagattgcccaaagaacagtggctcggttaataaagactgcattgcagcgtcgctgatgcttagattgactcacagctcctcggcatatctggagaatgtctgggtctggactgccgaccatgatcttgatattgcgtctcaagatcaactggatatttacgcagctcgtggcattcttattgaaagccagggaccaacatggctttatggaaccgcctcggagcaccaagtcttttaccagtatgagctatatcaagctgaaaatattgtcatgggaatgatacaaaccgagtctccctacttccagccattgcctgctgcacccttgccatttacgcctggtctattccccggagaccctgatttcacaaactgcacctcatcctccaagacttgtggcttctcatggagtatgcggattttggactcttcaaccgtttatctccttggcgcaggtaagttgatggcgagaacacttggccattacttcaggctaacgattcaacaggattctacagttggttctcggactattcgcagaaatgtgtcgatggagagctttgccaagaccgtgggttccaaatcgaggagagctatgatacatggatctacaatttggtcaccaaggcaatttccgagatggtgagcccgacgggtgaaaccccaacttatgctaaggacaacaagaatggatttttatcctctttacttgcttggatccgaggctcgaaggtggtgattggtggtcgcgacctcccaggcttttatgtctgggacgctaatactgacgcggatttgatgactggcctgcctgattcctgcaaaacctcactcacccaattagtcggatgtgattcgtacgcgcggctgtttttggctgagagttatcggggatcattgggtaatgacactctcacagaatcagtctgtgatgaaagttgcggcgtctcattgaagcgctggtttgataatgttgcttctgactgcaagggatacaatgtttctgattccgctgccaccaaatatggtggacagatctggtctggctggaacgaaacctgtctcaaagataccagaacgggagaatactgcaatggtaagggtatctcgtgctcgttttctaagtcgctagtgctaatgatggcagatttgatatccgaatatccagccgttgacttcctagatgacatgccggaatcggaaatctgctcattctgctttgtcgagaggctgggaattatgcagcggtcgtcatactccttctatgatgaagggttccaggatcagttgggtaccgtcaatgctaaatgtggactgtctgttccgacagccaagcccccatcgctagatgcaccccctgagtttctacctgacccaatctgcatctcgaatcaaacgtatcagacagtctccggtgacacatgtgactctatcgctttgagatacaatgtttcatctgcttccctggtcatggcgaacaatcgccagctcatggtctgcaacgacttgactgcagagatggatctttgcataccaagcagctgtgcatccacatacaccctcaagagcaacgacacctgtacatccatcgaatcgtcgggccttcgccagcgtggtgatgtgaggaaatacaactcatgggttgaatgggactgctccaatcttcaaacatcaactgacttctggggccacataatttgcctcggcgttcaaggaggtacatacactgctactgcctcgattccgggagttactctagcccccgaagagagcacaggatattcaaattcacgcgtcgcgcccccggccaatgctactgccgctgaaggtacaaccttgaagtgtggcaagtggcgcgttgctgtgaagggagagacttgtgcacagatctgcctgcaagaatcaatcacctcaagtctatttgtcggagtgaacccgtctctcgcaagttcgaattgttccgacggtttaatcgttggaaatgcatactgtgtcggccctaatccgggatggtcgttctctaattcgactacttccttaagcacccaaggaaggactccagggagcagctcaatgccagtttccgcagctattctttgagatctactcccgcgttcagactttttctgagtaatagctcgtgacaaatccatcgataatcctaggtagacctccctactatagagactagatgtgattttcaggcatgattgtgcccaagtagccttcggggaaactgatagtcatttggtattcgaggatatgccactgcctccaaacaaagatatatgagacccagatacagctgcaatttgaatgttcaaaatatataatgatacttctaagtaagtgcacacttggaggtggaatcggaacagcggcatcgacggtctcgatgattttcgttatgtagataaaagacaaaaaggctaccctctcccacacccttgctgcgctgatcgcaccgggcgtctccgaccaaagtttttaggaatgaaatttccatcttgatcctgcgctgtcccatcgccctcatcatagacaggaatccagccatccggcaccttcggacatagctgttccatttgatcgaattgaagattcaagtaaagaggccacagtgcgcacactagcgacctcataaacccacggtataaaggcgaatcatacctctttgcggtatcataccgtccatcaactaccccaacgaaacccccgtgagggtcgtctgtcttaacaagagagttaagtgatcgctcatcaatcatcagacagacagcaaagcgagaatcatcacaatgttcctcctgcttaattttgcgcagatactgggcaaaatgagcacgtacttgctcaatactagcaccgtcccaacgccctgggtcagagatgatgacatccttatgagactcttctatcaactgctcggggcggggatcattcccatagcgtgtctcatggtgtaattcacccttcatccattcgtgcatcacgcggatcagcttttccttggcgattggccataattcctcagactcaggtgtgtagactgttcgatagataatatacccccatggaaaatgatatggaaattgtttagtcaggaatcgatgggtgatgcgatcagtcgtgcttctgtaccacggctctttctcccaattttcggaggcctctttagtgaaatcgggatgatgccagcgttttggccagaccgggtgatgatagtgtttgtcactatccagttcctcgacctggtcgtttggatcattgaacggggcagattcggatgaggagggcggggaattcatctgtggaaagtgatacaccacataagcaaaaagaaggagaagaaacaggtagtaaattatagagagtaccatttcgataggaacaggaccatgagatgctcaggcgcgggtgttggagagaaaagttgaatgcctcaagaaaacaagaagagaagaagctaagaaacctacagggctgtgagagggtttaaatagttcaggcctacttcccatcggccaatcatatccagacttcgtttagcgcggatccatccttggaacgacgactcttggcatctgtttgatgggtttgcatgcttccatagccccgtgcagtaaatagccctcaaatccagtcttcatcatagtgctcctcaacttgcatcattcctgcgtgaaataccagtcaattttcgtatcctcgctcgaactagactgcctaccaccctatcccatggggttcattgatctgagcccccaagtcataaaaagatcccaaattggccaattagattggaaaggtatacggtatgcaggtgtaaggcctgtcaaccaggtaagatacaatggtccaatgagggagagatctggaacgatatgtatttgtcttctaggtgcaagactaattcttgtcagatctgtcctggggtctgaggacccttagttatttatgacggaactatggtggggtaaggaaacgatccgactgcgggacgatgccgcaaacggctcggaccaccagtctttcaccgacatgtggaatggtatcactgctgacatgtcgttccagtattgtcaggggtattatccatgacagacgctcacttatcctctaagtgcaagaatagtacaaaatcctggtcagattatactttttcttggtaaatcctatgcactctactctatagtgtagccattattttccatgacttttattaccaggtcgttgccgttgaatcttgttatcttgcttcttggagtagttgaacccccggattgggagttgaacccccggattgggccggggaaaacctcgggccgagatctggacttatagactggaacatgcacaaaaaacagacattaatcagcagggttatgaatgccaatattgtagttgtgtgcatagaaatgggcttgtttgggctttgctgaagtctagtgaccatcactcaacttcaccgcctggccatataccacaatacacacatcaacaccctcgtccataatatcgtcagcgctcatcaacgaccatcaacgcctggccaacacatccactccgcaccaaaagactcaccattttgttcgctccaccccctgatggcagatacattctactgcggcgggaagactagccgaccgcaaaccatgaagacaggagggttgggaatacggcactcgataacgaaggttggatcttgaatttacgattctggtgattgatttgcatctatctagggctgatttcattcctccaatgatgatccttcgaaatacgaaatagatcataaagatgttgcgcagatctttgcttcttcgagtactgttgaatactcgaatactggtccctagcaccgcgaagaggtgcctgcacatcgctagaggccttgttaacgcagcaatcccctgcggggttccttgttctcgcagcgctctcctgcggatgtccttggttgcgcagcgctcccctgcgaagattcttgttttcgtagcgctctcctgcggaattccttgttgacgcagcacctccctgcgaggattgttgttgacgcagacctatcctgcgaagcaccttcttacatcgctgggctcgtggcagcgacagccgtggccatggagactctcaagcccgcaggcaagagggacaccatgacacatcggagtgtgaggaccgaagtcctgattttttttggctgggaatccggctccttatataatttttcggctacgtttctaccaaggaaccagttgcgcagatggtagcgagaaccactgtctcgttgatgggcgttgaagcgagttaaacgacgttgcaatggtctttggagactttgtggcctacagagtcaagtttcaacctggattcattcctttcaacaacctgcgttaagtgtggctaaccacttcatcaactgttgaaaagacagtgataccgcaagaaaatacattgcaattaaattgctcaacgcggtggcactctacatctgcccgttctagccacgtcgctcgtctctttcatgggggttgaagtgcttcaacagaccccgcaacaatgggttggagactgtggcagacagggacatccgattgtaccggctgttggccataggacgtgcctcccattgatcccactagaatcaggtttgtctatctcctagccccgcgctgctttaccggtactttttttctgttgctcttagccaactgatgttgcctttactagagtttttgctacctagcgccttaggcattatgaacatccttatatatccaggatgttagttgtattctttgacggagaatacaaaagtctagaccctgttagaaagcctagaatagaaacccgagtccagttttccaagacaatgaaatgagttatttcagctaccatggccacgagctaggtcctcgtgatcgccatccacatcgtgagattgcaacactactgtcccattgatgaaaccctggacacatgaagcaccggttgtatcaatcaaataccaggcgcgaatttagatagatacagatcccaggaacgacccatgggacagtagatcaaggatattctatttgtggcccagagaagaatttggaaggacttacaagggtctagacacaatccacaaatctagtcttgacgggccgtcagagtacagatagaacaggcctttggtacttaggggtcggtcggggcagataacgtatttggaatatcgtatagacttttagcaatagagatacaatccgccgaaatttcgcagaaggggtaagacttctccccattcccttctcttaatcaattcgttatcttattccaattctaggggaactttagacagttcttagcgtaaatccttaggtcattcaccggaaccccgacctactcagtgagaattgcgacagcttcaacccagaccgctggctccagaaagaatcgggacgaatagatgcctttttaatccatatatgtatataccccctccgactactagtttgtaaagttaactaatgaccatttcactgttatagtggggggctggatacaacgcatatcctaggcgcaatttcgcgcaatttgaaatatccaagcttactaccacttttttctaagactatgacattaagcaagcggatcctaaggaagagtagatatagcacaatcgttttatttacataccgagtcgttggtggagacgatgcaccaggttacccatcgaagcttccccaacctactcgagcattatcgtcatagaggtcaggatttcctggtgtgggaagcggttaagttatccataggccaggtactaaggtcgcgatactccatcgacgaaggagccctcgccgcaattgtttggccggtaggtatagggcgtacaggcggtctccctcctctttctaaaggaaagggtcgctaccattaagaaactaacggctaataattggtaggtcctaaaataaataaagcatctccgtagatagggcagagtactggctaccttaagcgccgacacaatttttctcacagagtccagtatcgtcaaaattggtaagtaaggggcagtctagtttacaaacaccttcgggtagtgatactaacgaggaatatatagcgggggtggagcacagttaccaaatcgacgcgactgagatagacgctgtaaccctgaagctgatagccctggctgacatggtccaaaacttgataacaagaagctctccaggaacaaaatggagccctaaggcccagagtctccccaaggatctgaaccgactgtcggttaataagctactacaagtaagtataatcccacctgtctatcatacaagactgcggctaaccaggcagagtaaattctttgagcaattagggtctagggaggaattaaaaatactagtaaacgtggtaaacaaagatacatgccacaaaattgattttctcggttacacataagaagcgcataatattcacgcgtatatatccgtgcggaaatcccatcgtgtggatgttctttgccgtaaatctaactgtaataggattatctgcgtagagacctctggaatactttctaaggtcactcaaattagtcactggagtaaattccctacaaggtttctttctacttgattttttggggttatagggtattggttaggtcactccccacggcttagcattagtaggcgaaacccttctcttaatccgagtatatatatatatatctctataatagtctccctttacttttctgttcaagaaaccaaacacacacttgccgtttctaacacagtttattcgcggctgatccttctcagaagacttctatctcatcagtagtagcctatcaacgcgtaaaagcacataatggtcgtgatacagccgtgttttcactacaaacaatataagatttcctattataggggttcaacttgggatccacccactcctgcttatcgaggttacgataagataagtaggctcaatcagataagtgggaattcctacagatactcgcatctgatatgcttacaggacataaaaaacaaaacaatatatcagcaagtcagcctaccagaacctctccccaaggtttacagtgccacttcgcgagatatctcctgatatcaagtccaatcgcgttcttccgccggcgagctactattctagttcccatagctttataaagccttcatcgcctcggtgactcccgctctgacacacgtcaattcagtctctagccgactagttcggagcgagctagcttcaagctcagtccaaagccgacgagacttttcctagaaccaatcgcttttgctatacacgtcgtctagccaggcccgagtataaccgagctccacccccagctcgcagttcgcgccttccagttagcggatttttgctataaataacccgtcttcttcctcatacaatcttacatcttcctatgtctttgttgagtgccaggaaaactggcaggtataggaattctcatatcttcccctagatcaccgagtcagaaccctgcaaggtctacggtacaactgcttcaagcgaccggcccaattcttcatatatagcccgaaatagaccgacagatccactactttagctcgactgtaataacaatttcttagattccgtcactaaccaggcgtatctgtcctcaactagtagctggaggcgaacttagctaggagcaatattaaggccaagtcgattatctggattcattagttccccctttccgtaggatatataagacaggtatggatatatacagacagtacctctcgacattactatcttatcgcagcacgcgtttcattacttttaagagctatttctttgccctcccatatatatcaaatatacgagaataaatagccacagtttttataactaactataaaagattctatctccaggtcgttatatctataggattcggttgacagttcgttaaatattatctattaaagtctaccgaactgtaagtcttcaaaaggattaatagataaacgtattagagtagagataaacggattttaacggtaatttctaaagagagcagcccttagtactacagctttaactatatactaatagctaatagcctctagattaaatataaacgatagctcaactattcggtggtcttagactaacgatcagtgatcttatgactaccaaataaggtaaagaacgttaagaaatatagataaggctaaattgtatcagctacatatataagataagatttggctattagtctgcctatataaagcagagggctattaaaggcctacccctatagtcgaagtattacacaaatattaacatatagtttattcttagttaaagcagacccagctatccccttccctatatcgcttaactagtttggaatatctactatttgcctaccaccgaaccaataggtttcagattgatgcaaagccttgtatcctttaggagctcctcgataacttaataatgcccgttggaatcagcgtaccacattaaactcttgcccgacttatctacagcattgaggtctattcgggaatcctctaagatgaccttcacggtgtgtagataagctagcggccgttgacagggcgctttcgccatctttattgttttgagagttgatattcaatcgtttgccctgcttcagtaggagactaactaccttagttctaccacacttcacagtaagccaaagtggggaatcctcccctgggcggactgcattgatttggatatcgtttctctgaagcagtaatttaactatgtcaacattactgtcatgtgcggcgtgaccgagaggtgtccaacggaaagacccgaggacatttagatccaactctggatttttaatggcgtatctgactacgttatacctaaaaaggggaaacaactagtgtggattcgctaagatctaaatggacgagggagagagagagagaggaagagggagcggaactatctaataatctgggtccatataggtgactgccttccggtcacccaacatcccccctatagatcttatatctcctattttaaaaataataatcttaaaatgttataatcgtggtagttataaaaaaccccaaattttcctttaaattaagttatcctaataagctttaagaaagctcggaattactctttaggaagtgcctttataaacctgtctgccgcgttctgctttatattaacccttaggatatttatatatccttaggccacagcgtcctttataaagaactatcggagtacttactatctagtagtagacttacctcccttctttattagtagtaactgtaaattaatattattagtatagataactataggattaggtcttagtaggcttagtaagtctataaccttagtaagctatatagtatcctaggccggctaatcgagtatatactattctactattattatagagttcgctgtgattatctactttttagtagactaagctactaggactcctataaagaactagatatatccttcggttaatttagagtctatttagtctatatataatatatctataaatactataaattatagttcgtctaactttctaaagattagtcctatcttagggttatatctaaggtacttaataacatatcttattaccttaagattagaaaaagttggtattactagtctatattataggtatataacggcgaatctaatatctggtcttatcttaatagtaagctagttgagtatccctactactgtttagtagtattcgaagttctcgttatcgagtaggttagagttaatatcttctaggttagactctctctatcctagtggtagtagtgtttctttcgttcccatagtatctgtaatatatagaatcttttgtatataggcttcttaagatatgataattgtcttagcattataatctctattaagttgtaacgggctagagcccgcacaggatcacgtaataagcacgtgaccttcgccacccctgttttctcctgtttcttcctataagcttcatttcctttccttaagcttttagacaatagcaaacggcttagttagcttgaattctaatctagctctgtcccttcatattctaaaagcttccttttccgtagaagattagaagagtacagaaggatataccgacgaacggcataataaacgagaatgtagaatggtcagaaccgcccgaatgggctaaagtgatgatatagcgattagtctagtctactacctcctaggaggagatcgcatgagtataagaggaaaggattaagaagcttaaagagctagtctagataaacgtgatagcacaagaagaatctaataagaataacgagactaaaaacgaacctacctaggggttatcggaaatgagataaaccatacaaccatggctatacctccccaacccctataagacccctaggtatggaatgcctaagggaatgctgtatgtaatagaggatcaggaaatagagatagtagtatatatagtggtatattaggaactaatagctgcttctctaaagaagcaccatatgaggataatatataggttataggttatatgattaaagggggctgtataggcagtatacacggctcctgcctagcctatagttccctatataccttaataggtataataccttaggtattagccttcttagtactagggtcctaataatatccccctccttannnnnnnnnnnnnnnnnnnnnnnnnnnnnnnnnnnnnnnnnnnnnnnnnnnnnnnnnnnnnnnnnnnnnnnnnnnnnnnnnnnnnnnnnnnnnnnnnnnnnnnnnnnnnnnnnnnnnnnnnnnnnnnnnnnnnnnnnnnnnnnnnnnnnnnnnnnnnnnnnnnnnnnnnnnnnnnnnnnnnnnnnnnnnnnnnnnnnnnnnnnnnnnnnnnnnnnnnnnnnnnnnnnnnnnnnnnnnnnnnnnnnnnnnnnnnnnnnnnnnnnnnnnnnnnnnnnnnnnnnnnnnnnnnnnnnnnnnnnnnnnnnnnnnnnnnnnnnnnnnnnnnnnnnnnnnnnnnnnnnnnnnnnnnnnnnnnnnnnnnnnnnnnnnnnnnnnnnnnnnnnnnnnnnnnnnnnnnnnnnnnnnnnnnnnnnnnnnnnnnnnnnnnnnnnnnnnnnnnnnnnnnnnnnnnnnnnnnnnnnnnnnnnnnnnnnnnnnnnnnnnnnnnnnnnnnnnnnnnnnnnnnnnnnnnnnnnnnnnnnnnnnnnnnnnnnnnnnnnnnnnnnnnnnnnnnnnnnnnnnnnnnnnnnnnnnnnnnnnnnnnnnnnnnnnnnnnnnnnnnnnnnnnnnnnnnnnnnnnnnnnnnnnnnnnnnnnnnnnnnnnnnnnnnnnnnnnnnnnnnnngaacttaggtatctcctatatataagggtatagctaagtagttatttactagtaagagaatatagttaggataaaggggaatactatatatatatatacctaggttacccctaatatcttcttctcttctttaaccccctatcttatttacttagtaaatatacctaatttatatttctattaaatttctattaagataatattattctaattagggtactactattagctagtaaatatagtaaatatatctttagatttagtagtattatattctatatagtatactaagaaaatttaatattatatctatcccttccttatagaaaacggccttatttatatatttatatactaattatatttatagaataataatagtatattattatcctatactatcctcctctaaggaggataaatctctatatctataagtataatattatcttttagtaggctataggtctataattctatctctatacttagaaacccctaagcctattaaagggctattaccttactagtagtactttttctagctataaagctacctagactataagtataagatccttataggttatattaaatatacttactactctttagtaaaatatagttatatccctataagtttaactatattattatagggaggaatttattattaataatagtatagcttctttttaaggtttaaactactacctatactacttttaatatattacctatatatacttatataccctaagtatatattattaagcagaatattaagcacttaatctatatagctaataaagctaaaaaggctactactattatagaagttatagaagttattagggtcctaagaattgtagaaaatataggagaaatctctaaagttaaggaattctttaatactcctactagtattctagaggaaagtatggttcctaatataggtatacctagtaatactttatttatccctaaaaacttagtccctacttcttagggtatcttaggtatagagtctattttactactttattatatttttaatactactttattagtatttaagtctagttaggtatactaaccctacctatacctatatataaattctagtaaatatagggaatatagtactaaattttaatctataattaaagcttcttatattttaagtatatattcttagtccttatcttttttagtatctttactactatagttatcctagccttatagttattaaggaccttagtatccttaactatagactatagttcctagattactttaatattattatagctatactacttaactaaataggacctatttttcttactttaatagaataggatatattcgatcttatattctacttaattattaatcttaattagtttaggaatattattattagttagagtattactataatataattctagtactaatatatagtatattaggtatagtaatttaaaatagagggatagatatagcttatatacttatatatcgaccttcttaaagattagaaatagacctagtattttataatctagtttcttacttagtctacctatttctatattcttactcttaagatatacctaattactaaccttaaataatttatctatataatatttatctatataatactttattaactcttttaccttagtaagtcgctcttttataaagctccttatttcttagatttcttataccctctatatagtatctatatagtactctttagggtactctttaacgctatcttagataaataagttatatcctattaatactttatacagtgactttctagttatactataagttattatattatatataaataccgcgatagggagctagtatacccagttatcttattcctagttaatatataaccgtaggaagtactctagtacctagttttaacgtttagtctatctatcggtttagaggtagaatatagtagataactagtatttaactataaggagaaagtagaaggtcaactagaactagctagtaaaaaggctacccctattgcttactagattctctagtatactaaagatcgggctnnnnnnnnnnnnnnnnnnnnnnnnnnnnnnnnnnnnnnnnnnnnnnnnnnnnnnnnnnnnnnnnnnnnnnnnnnnnnnnnnnnnnnnnnnnnnnnnnnnnnnnnnnnnnnnnnnnnnnnnnnnnnnnnnnnnnnnnnnnnnnnnnnnnnnnnnnnnnnnnnnnnnnnnnnnnnnnnnnnnnnnnnnnnnnnnnnnnnnnnnnnnnnnnnnnnnnnnnnnnnnnnnnnnnnnnnnnnnnnnnnnnnnnnnnnnnnnnnnnnnnnnnnnnnnnnnnnnnnnnnnnnnnnnnnnnnnnnnnnnnnnnnnnnnnnnnnnnnnnnnnnnnnnnnnnnnnnnnnnnnnnnnnnnnnnnnnnnnnnnnnnnnnnnnnnnnnnnnnnnnnnnnnnnnnnnnnnnnnnnnnnnnnnnnnnnnnnnnnnnnnnnnnnnnnnnnnnnnnnnnnnnnnnnnnnnnnnnnnnnnnnnnnnnnnnnnnnnnnnnnnnnnnnnnnnnnnnnnnnnnnnnnnnnnnnnnnnnnnnnnnnnnnnnnnnnnnnnnnnnnnnnnnnnnnnnnnnnnnnnnnnnnnnnnnnnnnnnnnnnnnnnnnnnnnnnnnnnnnnnnnnnnnnnnnnnnnnnnnnnnnnnnnnnnnnnnnnnnnnnnnnnnnnnnnnnnnnnnnnnnnnnnnnnnnnnnnnnnnnnnnnnnnnnnnnnnnnnnnnnnnnnnnnnnnnnnnnnnnnnnnnnnnnnnnnnnnnnnnnnnnnnnnnnnnnnnnnnnnnnnnnnnnnnnnnnnnnnnnnnnnnnnnngaggactataataatatagtatataagtcctataatataagtattatagataagtattatattactagcgatataggaattctagaccccctagtactatacctaatagctataagagctttttaaggtaaaataatatatatactagtactaaagaactctatagtaaaattactctatataacacaggatcgcgatctaacgtcgcaggacatctatataaaaatagaggaggatagtattagtaagtaaaagctaagtaatacaccctagggattaacgctaaataggctacttaggtttaataactatatttatatcctaagagagactacgatcttatataaaattataaagatatactataataatccctagggaggctattatactagtaaatataccctcgaagctatttagtataagttctattagtatagaattataaaggatataaggaagtatatatataactatataaattattaatataattcagtatataggtataagctatatagattactatagctattactagtacctaaaaggcctagtaagtagcttagtatagattttattactagaatacctttattatagtagaatagtaaggtatataatatagtattagtcttaatagatatatttactaagtatatcctttatcttccttatataaaagaaattaatatatctaagttagtagatttattatataaatatataattctaatctttagtatactaaagaacctagtaagtaatagggatagcctttttactagctaattctagttaaccttctacttccttcttataattaaatactagttatctactatattctacctctaaactaatagatagactaaatattaaaactaggtactagagtatttcttatagttatcttgctaataatctagaccttcgactatactccattctgccgggccttcgacgtgtctgtggctcagtgcgcccccgctctagtgctaagagcatacgcaataaaagaccaaacttctcggttgcctctggatacgtaagggacaaaattatacttttggctgagggattggctgttcatgcaatgatacagggtcattttctcgacttagtcgtcttatagatgagcggtggttgtccacccaaaaaaaaaaaaaggcctccctttccgggaaaccatttatcgcgaagtaaaagtgaacttggtgaaatgttaactaagactgacactgggaagatggagcctttagcagtcagtatccctcgccattctagaaccaccgtaacactgacatatagactatgcgtatccaaacctccctaaattgcgatctttacactcaaggctcgaacggataccatgccctggatcatattcaattagagattcgatcagtagagcacggccttcatgatgcagtcctcctggccattcctctgggcaaaagccagtttgaccttgcagttaaacaggccactgtcaggcaaatcaaaaaccacttcacagacctaagccactcgcgtctagtgagctatgatcctcttttcgcagccgaattcggtcgttcctttccagaaaccgcattcagtgctttgacgcaaatgagatatcaatacaacctggcggcgagttcaattcacttatctaaggacccacgccttatcaaatggtttaaggctgaaatcaaacgcattgaaattctcatagatgagtaccgacagcagtgtgttaacctgggccgaattccagattgtgtcaagcagcaatagacgaaactcaatcacgtctgcaaagctatcttctacatcttgcctaattaatcatcactgtaatttaagatactgcatgttcatactattggccctttcccgtatgccagtcatcgcgcaactgcggagaatttgctcaagcacctttccaggggctcgtacgtttcgagcgtaggcaaagcatctatacatatagctagcctcctaagttaaataaaattataaactgctttcgcgcagcgcagaacgagagatttggcgtgaagaatgggattccagtatcatgcgtgaccatgtgtcagcaagagttgccgcaatctgcatattgcatcccacgatggcttggtaactgataccgaatttcgagaatttcctggtttaagccctgaatgaactttatcattgatcttctagcgatagcttgacatcaggttgaatcttgaagaaagcttgaattattcgggcggataaaggccttcttgcttcgtaaaatctttctcaatgtgacgtatttcttttgggtatgtagagcaaagtgagtggcccaatgttaatccggctctagtttaataaacgggcttagggccaggtgtctatccctacgagcacagcctggtgatgatgggaattggacctcaaacaagggagccggcggtcgccctggccaagtttcacgctttgccctttctctggtccacaagcctaggtgtcgagtagagttttccactgaagtgatcaggagattgagcaagtctagtaggcgtgaaccgtcgagcatagtcatatgtcatccagcgagagaactaggtagatttgaactgtacctcgtagggatgtcttatcaggtaactcattattccaatacattttatttgtatattgggtgagaagcctcaaaaacagcaagatgttgggttttcatggagtcggcgattgacggctccagtacggggccatcggcggttcgaacaagcgtaggccgaaagggaacgtctgtatgctccgacatacaatacactacatatgctgtggtggaaagactccaagggccaacatatgggttcccaggagttaacggatctccaggaccatcagctacgttcctaggaatagatgctgcgttcctggaagtaaactgggatctatgaaaccacatgccaatcgatcgattaattgattcatagtctgtcccagccttttggaaacattgccagccacacttggacaacagcaagaccatcgttttatgggtctggctccatgaccgtgtgtataataattaaacacgtggaactgaacaaggatgggaattatagaagatgagaattcgtgaagcctcaggcagcaagactactggaaggaccaggaccgtggttctgaatgagctttttctaaaccgcgaacttgaaagtatccttgaactccaagtagatatatgtgataaccacagctatatttatatctgcttggttaggatttcgctactagtctagaatgtctagaagcttctaaatatatatcagctatattagggttcttatagttgtggtcgatagaaagaactactagagaggcgagataaccgaaccaaggaggtttataaatatagctagcggaaggaacgagccggtcgggcggttcaggggttcgcgtcgcggtccgtcccgccattattttcaaaatcgattccgtcgccacgtggcccaaaagacattaagtagctccgacaggtttacttgcatagaccgataccccagtttgtcacccgataaatgaggtttctggactctcgaggtggacaaagcctctctcaccccgggtgtctctcagtttgctccttaggcatacatcacgggcaaatcaactaggacgggaccgcttcaaccaggctaacctgatctcaggccctcagtgcgagtgaggtagttggttcccggttgtttgtacactgacacgcgcatccgtcctctcaggctatacagacagtctcttgacaggccccgaccctgccgcagtggctgccattgtacaccacgccccgcgagagccttcactctcgtttcgcgttacctgaagaggtctccccccgccaggccgaccgtgtcttgcgaaaagtcctccatgcgctccatcgggcagtatatgtcggttgctctccactaaccaagtttggtccccggtgtctggacagggtcaagacagagcgtggaaagcaccacttggaatgttctactgagctaccgaatttgtaaatatgatcttagattctcttagcagcctcatttaacgcgggccattatccatctatgatgatgtcgcaaaccccaagaattatgtatacggacttgccccagtggttcacattgcatcatccctgacgagaataaccgagcagttctctttgagaaagatagtaaaaatgacagtagaactataattatcgcaagccaccaggttcccaagatagcccctcgagttgagaacagaagttcaatgaaacctgctcatagctcagctccaggttacttacgacatccctcactgcagttgcagccaagaagatcacattcttttttttttcttttcattagtgatcgacccaaattcacgagttccatgggtttacttacttcctttgccacaaaacgggtttggcttcgatccatctgcgcatagtttcttgcaaatttcagtgcccagggcgtctgttgagcagtgtctcttgcccactccatgacagcactccgccattgaaagatgcgctgttgcaaggaaaaggaggcaaagtgtaagaactttgggtacacttatgacaaacatcttgaaagtttggtctaaggaggtcagttggtgtacagactggggaaatgctgtgtatataccagtaatgaacaagtgtacaatgtcttgtcgaaaacgtttttctctgttggcttctgcgaagatcaaaagtgatatgttttcctttcatgtcaggtagtctctgcttcttattgtcactgtgtctccccccctttggtcccctttctaggagataatacctgaagatccacagccctctagggatgatatcctgctagagttaaagaatgccaaggtctgaatagagtggcatttgctccgccgaagatggaataatccctgtgcgatccccaatgaggatatgctctgaatcattagaagcaaaataactctatcttagagatcttattggcatatcaaggtatgacatgtacctgttcaactttgataacgcagaagggatggcattctaaaggttcgctatttgattgagatcttcaaggaaaaattacatacctcgtagcactggagagctcttatttgaccaatgctgcatgcacaccatcatggctcttttcagtggcgttttacttgcaaaacaaatctacataattcatgtctttatcatcactctccacaaggcttcacatcgtactctacgtcagtccgaatgatatattttgctcccttcctcacccctgtaccttcatgtagcaaggccccattcgactccccatgagggaatatcgcaacagctcccatcacaggtcgcaccgggtatccgttgagggtcccttcccgcggggctggcatgaagaatgtcgtctctccgccctcaaactcatcattgagatatagtagaaatgtgtacatcgagctctgtttcttttcctcaggcgaagagtcgtacacgtatgtgtcatcaggaagaataccggacggcggccaagctccgtcgatgtgacaccgatattcggctccgggaacatacctgtacacacggaagcgacgattgatgcctcggaccatgcgaccattgatagagggtggcacataaggggaaattcgtgcccaaagcatgtcgtggaatgtggtgtcaatgatccagtaaaagttgtgggctaggatgctgatgtccccatcctcgcgaaggggcgcgtccggcaggaaattaacagattcaccggcagcgatgatcgccttgcactcggtgggggataggacattgagtgcaaggccaaggcctggcacagcgggatgtgcgtggtatgttatggaaggaccgacaggagccagtgggacggcgttcggcgcggtggtatagagaatagccggatggtggtttgggggtttgcggagtgggccaggggtttgttcgatgatgcggagagcagatggagacttgggtgcctcatccaaaattgatttgtcaaggactgaggcgtagacgggaagtggcgtcgtcgaggggcggaggtcccagatggactggaaggcgatgggattggttgagtcaacggcgtttgtgttggtgtcaatcggggtgctgacgcgcaggatggcatcaaggacgcccaggatttcgttttccttcacactgcgctgaatggagacatgatcgtgtgatttatgctgcgtcgagaggccgctgacgacatccagatctcgcacccagcgacacaatgctccaatcttgggttgttcccccctgatcctcatctctgcaagcaagatcttggcttcaatgtatttctcgtccaccaatgcaccggttattcgagctgtcaagttggcgccctctctcgaacggttagcgacagtctttgagcaggaataacgcaacataccggcagtgttaacacccgtagtgcatgtctggcggaagtcatagaccgcgactcgcagatccttgcatgccttcgactttgtcaggcctggatattgtgcaagcgccgtgagcgtctcaattgtaatgtcgagttcctcgtctgagacgacggcattgagatgcgtgggctcgagaggtatgccatcgggaggcggtgttagattcggtactgctttcggaatcttttgtggaagatcgatttgtgcgttgcgcttacgctttgccgctttggacttggccatagcttttatgtagattgatacagagttcacgactttacgagtgcacgagtctgcgagtcttccaattcacggatattctgcccgaagattccgaccacgggattgcactcggattatataagtcacggagttttccaaggttccgcagcttgggaccttcagattatcttattcgccatacaatccaacctgaggtggttggtgatacattctgacatactcactgttgccctatgcagtttgtagaccttctttgtggcattccttcccttctctttgacttctctgacagacagcttgccgccaaacgtgtagcttgccgttcagcttgctgcgttgacatttcatttgtacgtctgcagagatgcttcttctgttttctggtagatgtaatctggctggcttcgtggtgtgaagctatatagacacagcttcaggacagtagctagttctccattttccatcaatccatcatctttccacttccagttgaccactccttcctctgtagtcaggacctttcatcaattggaaatcttgcattctgtctaattgtgaatgcctacatatagtaatgtaatctgtacatatgtccccgcacttattcttcggattgatggaacttttgcttggaattgtcgaccttctcatgtacagcacgtgcctttcgtttcgttttggtgtaaccttcaattccagcgagcatgatataagacttgctcatcgaaacatgggacatatcaacgccttgttgctgtagggcgtggtggaatgctcgaaaattggcagctggaggccgataatggccactgaacaggttagcctaccgtttcgagtaatgatagaagtcgatggatgaaagctttgactgaactcacctaagcggtgtcaggcttcgaagttggccatgtttgatcttaatcgttccagctgctgcgatacgggcacctcgaagaaaagatgaatgctgaaaggcacctgatttctttatgccgatgtatagacgaaaagaggtatctgcaacctaaggtaaatttggtttagtctgcatctaacaaccacggatccaaacctgactcacgaatagccagataccttctttctctgaggacttgccccagagtcgcttaaatgcagcagcggggcttgcgtgcaccacttttttcatcgtcttggcagtgtactcctcatcggtgaaatgcttcgggtcatgatttgagaggacatcgtcagggctgtgtcttctagacgttgttgatattgttgatgatgaacatgatgaacatgatgctgatggtgacaagtcccaggtggaatctggtagaactgtcgagtttccgttgaattgaggcacatcatcctcgattcccacaatcccttggagactatctttaaaacgtgcagtgtttgtccacactggttcatcgtttttggcccagcggaaacgtccagtctcgtcaactatcaccatgtaattcaaacgttcctcgcgattgagatagcggacttgttctttctcaagtttttctcgtggacactgtgaaagctcaatatttttcccatcgccgtagtccagccaatagaagaagttttcgttcgatgatgtattccgccaacacgtgtggtacgagcgcagattgcttccgtgtcgatgtttgagatcaaccatttcgagaaagtattgaagatccatcatcttcggcttagctccagtaatctctgtgttatgttctgatcgattcaccgtagaaggcgagacttccggaaaacggtcgtcgccgccgacgcgcatagcaacactaaccactcgttgccagttccggcgagcttgattggagccatcatcatcgctgggggtcacgctcggctcgggttgatggagttggtgccactgggcttctcgaaaggcctagagggaccaaacaaacaagatcagaatcgatcggtttcgcgcaaaatacacatgtcatacgcgtacctcaatccatctagtggaagcagccaagtgcagtccatgcagctctcgtcgcgttcgataaccacgatatattctctaccgatggtcagcggacatcaacaacaccggaattcctcgtgtacctgaaccgttcgcgcggcttgctccttatcgatgacgtcatgtgaaagagtcgaagtctccagaattttggtcatggacagaagtcaagagaatgcaaaggagaaagaaacccaactatcgaggagtcaaggaaagaaagatgagtctcagctggcccggcggggaaaggtcatggtcatctttgtcatctttgtcatctctcgttttccaaaagagaacctcaacgtctccgacttgtttcattacaagaattctcaagaattaccaaatagaagagaattggagagctgaatagacccctcatgacgaattttcccttctccccctacaaagaaacgatcggtatcgatcccgagactaaacaggaaattatttccccattcaggacccgaaccccccgcattggcaatctatatcgttcttagatactacgataatacgccggttacccctcgtgaggagatgtgaggagcattgatgttggagcttaccttacttataaatggagtcgacattccctctcaactcttccattaacctcgattatacccattcacttcactcttctcactatggcaccctctctccaccctctcatcgacaatggaatcacaccaggctccagtagcttctccggagggaagctgcactgccactgcgcctccaaccaggtcgagatcaccctggatagcaatgttgcccacaaccacgcctgtggctgctccaagtgttggaagccatccggttctctcttctcggtggttggcgttgtaccgcgagacgccgtctcggtgacagccaatgcctcgaagctttcgattgtggacaaggatgctaccattcaacgcaatgcctgcaaggactgcggtgttcacctcttcgggcgtatcgagaaggaccatcctttcaagggtctcgactttgtacacgtggagttgtccgatgaaacaggctggcaggaaccacaattcgccgggttcgtctcatccattattgaacagggtttccaccccaaagagatggatgaagtgagagccaaattcaaggccgttggactggagacatacgacgtgctgtcgccggcgctgatggatctgatctccacttttacggcgcagaagtccggtatcagatttgccaatttgtgatttagcgaaagtgttgtgtcctttgcatgtactagaaaggtgggagttggtagaggtgcggagtttgaattcggggattatggaaaaatgagataatgtacatgacaagcactatgttacagtgaagattggctcatttagtagaatcctgtagaagttatattcctctcatctcctatcatctcctattctacatcaacatcggaatatcgtatctatgctgacttcagcacttgatcttcaccccttgattactctctcacctttctcgtcacttcgctgtttctcggcggattctgaacatcctcggtttccccgcgcacccgggtttttcaaaaagccgaaaggttgttgactcgatttctgcctcttcaagcgaggagcgcgtcacgctgcatcccacgcgtgcgaccgggtttcttcaaacccagtatacatatctagtcgagttccagcgaacggtgcgcgaacagaatatgtttagatttcccgcattattactgggcccagatagacgagttgcatcaatttccgactgaactctatgagatgtgagcaagggctggttatgtattcctgctacaactatatggaggttcggagcttgatttagactattgcggagtctggagacataaacggtgcctcgtctatccatatgaatatctttggccttgagccaattaccaggtttgggaccgagtagaacgaacgttcactccactcattgctcctcgccacacatcatttggaaaggaatatcttcttttgtcttctgcattgccttgccctcctttactacacagagaagagcaggtaccaaacaagtattggagcatcatcatatgttcctatccattcagcattttattttattattagggaatcattctcgttgcagtcatgctttagtatatgtcaatggtcttttatcgggaatttgaattcttgaactgacgcgtgttctcgaagtttctagtattgatgtagtgcaagtgatcaatgcttgacattctgtacacagattttcgctagttaagggcgtacgttcttggctatctttcttcggtgatatggtactcaccagggcatgaaaagatccaagaaacagatccattgatcatatacgcaaaatatctcaggtcagtcctcgaccatgatcaatccatgtgtactgtgagtatgtctgacttcaatccaggatactgcgctattggtccctactcccatcgtgtatgaatgcttgcgagcatgcgaattttttggggcacagagcatccaagtattgtcctctatcgagctttcaagacaaaggacggccacctggtctgagcgctacaaacaaccaccattctcaaattctttgtgtgttgaagctatcagagctggcgactgacctacggtttgttgaccacagctctcgtgtccaaaatcaggttgaattaaaagagatatttgcaccaatcatctgtgcgaagccgcccgtcttcgatggtatgaaatgggattttcgacgaaggaaataggggtaatgcgagaacaggggcattacgcgacgatcatgagctttggaatgctctagttccagtttcctatgcagatcttctgctatggggaataagccgccgctttacatggaatatctcactgtggtatcaatactaacttggtggctcatggatgtctcaatataagatgctagttcgaaattgcacttttcgatcttttcaccttactctagcatcatcaaaatggatcattattcagattcatatatccatgtacaatcatactaagtgaccaaactatatatggcgtatattcaccctttccttattctctcaatcttcagcagggtaaaaaaatggcaaacataaaaacaaattgacatgcaccaatgatagattaaccgctcagcgtaacccaagctacagcattgagtggctggcgcaaacgatgcagcagcaaaattgagtgagtcaagccaaaggcactagtttggcagctaggagttggcgtagctgagtgttgaattacaatacttgtggctagctgggagagctgaagcaatttcatgaaccctagttcgtgccaattgccaagccagcatgcaggccaaatcaaaatcttgtctaacatttgattggtgatctccgagtcagatcatgtcaaaccgctctaggttgaggtcgcagctgcctatagctgtaagttgccattttgaagtagacgcccatagtagacggcattagcagattttggctgagaacgaatacctgcattgtttggtcgccaataatttcctcacgctgcacgggcggtcgtaaatggcgttgtctgtagagctgacggctacgctctgatgcgtggcttgcattaaaatgtgacaagacagcatatgttaaagttcattcaatgtcgatcattaattgctttgcaggagtctgagactgctgttcagcctgtcctaccttcacaagttgtggaagaaataatataaaagattcgcctcgacccggtgtccccaagtacattcttccataacttcgaatgcacctcttcgggcgattgagaaaaatatcttccaaacgaagtattgcttcaacaatttcgataattccaccagccgataagatggcatctgaatcatctgcgtacgagtactaccagatccaagcccggtttccggccaaagattccaatcctgatgatggcatcaaccgaaaggtctttgtccggcaggatatcgacgaatggagcggcaagaagtccaacaaaaagcaagtggatcttttcatcctggctctggacaatttccagaagctggaccccaaagaaagactgtcttactttcaggtcgccggtaggttctgcttgatcagcttctgttgatggtatttgacatgcatttgaccaggtattcatggacaaccgtttgtacgatgggatgatcctagcccagagcccatgcaaaatggctactgcttccactctcatgtgatatttcccatttggcaccggccatatgtgcttcttttcgaggtaggaggacctgatatctgggaggaattttgtactgatttcattctagcaagtcgtgtatgacatcatgatcaaggaagttatccctcaatttccggaagccgatcaagcttcatggcgtgaacaagccgagtcatggcgtcttcccttctgggactgggcacgaaatggccgtgtccctgacttggccaaataccctaccatcactgttcctaggcccgagggcggatcggatcgaatcaacaatcctctatttcagtttcgcatgcccacagacaagccgatgcgaagcgagggcgtcggtaccgaaaacacatgggaaaatgacaccgaacaggaagagtacaagaacgtatgtatgatctaggcaatgtgaagacaaaaccgagctaacttgatcagtttggcaatgcaattggaaccagccgttggccggatgaagatgaccagaatccaaccagtcagggctggcgtcatggtgttgtcaataaccgcaaagtggcagatgccttcaactctcacgatggatacaatgacaagaaccatggtcctgctgctgaaatggtgtataggctgcttactgtgcccatggactacactacgtttgcaagcacaaatccaacctcgaaagatcaaaacgtcgacgaggacttgaacatagaatatgtgagtatgttaatttgtcatgtcggagcacagtaactgactggaaattcacctggatagatccacaacaatgtgtaagtactcgaccagccggaaaatcgatgtctacatttactttgtgctattatcagtcgcttcagacactaacaacattgacttaaagccacggctgggcaggtgctggcggacatatgggaaatgtaccagttgcctcttttgacccgctgttcttcttgcatcactggtaagtatatgatcttcttcgaccacgtgggaatgcaactgtgattaacagttgcttgtagcaatattgatcgtctcttcgcaatttggcaagctctcaacccggacaagtggatggataacattcatggcgacaatgctaccatccgtgattcatttggcaaagagcatcctgtggacgaaaacactccccttcagccgtttagacgtgacgctgaaggaaattattggacccctgaaggaattagatttccttccaatctcggatattcctatccagagctgccacggtgggacagcaagtatcaccaggaggacggaacactcgaccaagccctgtttaaggaaaacatcatcaccattgttaaccgactgtatggtgtgtcgcgtgatttggcattggacccaaaagctccgaccccagagggcgttgaggcaattgacggtgggctcaaaattaccgacttcgccttcagtgttcgattcttgaagtacgttgtccctgagaaatatctgctgcaacaagaatttacatctaataattttgaatgacttagatacgcattgggagggcaacctttctgggtcaaattgtatctcgcccaagaggacggcatacaaaccccactgacagacttgatcgctgaggtgtacaacttcagccaaaagcccgagttggatggctcttcggtctgcggtaactgcaaaaaaggacaaaaatcgcgcgtcaagtcaactgcttacatcccaattaccccggttctctacaagcttctcaagggcggacggaaactgaagacgttgactcgcgacgaggtcttggcgtacataagaaagcgtgcatactggcgggtattcaaggtaagcatacctagtcactagctgccaccattgtatgaaacttgctgatctctcgtagaacgagaaagaattacctcgctacgaggttgagaaactggagttggaaatcattggcagcagcaacgacaccacgcacttcaccaaccccgctactccgccagcctttgagaatttcaagcaagagcctacaatcactggcggtgctgatggagcgctggatccagagctgaagcagacaaagactgacccaccggctccccggtaagttccgactcctataaatgagggatagatatggaaatatgatcgctaacttcagtcagaccaaaacgaccaagagcgaatctgccacttcacagcagtcttaaattccagcagactctcaaggcggacagtgtcattctcctcgagtcgtcgagcgtggatcttgtccaatccaatggcatcgacatgacacagatttcaatcctggatgcagagaatgatatcatcttccatctctccattcgccgagctcaggatgaaatcattttcaattccaaactcggtggatcatggggcgaggaggagcgggtcgatattgacgatcgattcgaaagtgaggatggtgcgacaattttgatccacgaccaaggtgaaggcttcgaagtctctatcaattgggtccatgcaatttggtttggcaaacgtgccaagggcaggacaccacagtcaattagttatgatcttggtgacaaggaggggacttccgctttgtccgagtatctcgaagtgcgcacctacccttcggtgaaagctttgttccttcaaaagcattctcatgaggaggagaagtagccacctgtggttgatatgtagtttgataggggtataggaaagatggcgatgttaatttgatcaaatttatgggaccgtggacatacatatcctcaagtcaggcctgaaccgacatgaatacaagtatatggcagcatcttgtattttgaaataagacgttgtattcttagacaagtaatgattctccgcaatcacaatctctggtcgagtcaaggccagtaatagatcccataatcaacattcttcttcagtttgtcattcacgcgcagatatccagacttttccagagtcccaagtttctgcgtaataagttcggccacaattcccccaaacaaaatgctccccggcacgttcaaatgggtataatccgctgggttgaggttgtatgtaaaagcattttctggcccgattgcattgagataccaggtgctagttttattcagatcaatataggcagcgtttgagcgatgagcggcaatgatggtggccaaggtctcattggcgagactcatgacgatacgcggtgtccctgttgatttatcgtagttgcgccgagatagaggagtgacgagaatcggtgtagccccagcattagaggcctcagtcacgaatctttcaagattcctggtgtattgtgataatgaaatgtttgctgcgggcttttggtcgttgtggccgaattggattgtaacaagtggatgatagtcgtctcgaacttgtctcacggttgttagaacctcgtcccaataacctccgctccggaagctaatagtggttgcaccgttgtgaccgaaattgcgaccagatgctcctttgaaaagggttgtattgagaagtccatctccccatcctcctccgttcgaggattgagttgccgtggtgctatcacccaccaaaacaaaaaaatggagtcttatgcgaggatgcaaatgcactggaaggatatgcctgaacgtaagataggatactgaggagggctactccggttgctttccagatcacgtccattattgtgtacatggatgcaacctttgtgagttattggggttagagtcattctccgcgaaagaagtgttttcatataaacttatagctctcacatgtgggttgatacactcattcctcccattggtgggaattcctcaatgcaggaaagtgatttgcttgggattcatgaatggagtgacgacattccaccaatcatcctaaatacggaatggcgcaggttgtgttctttgaagaattagtataatgccgtgagaatagaaaaggccaacgtatatccatcacatttcagaggagtatagggcatcacgccaggtagatcatgaggttgtttggttcccccactggcagagtccgagctggatccatcgagtacatgtgaaggttcaaagcatcgcagaattgttggattgtgtggtggatgagcccgagtcgtagggcggacttggaggaaacaaggtggaataattaaattcacatgtcttctgcattggtcagactttcatgagcatctccaggtctctgactgatgtccccaagggcccaagcccccacgagcagaggcaagagtcttcagtgatcttatatacagacagcccttgacggtggatcttacccagaagatcagttacattatatttttcggtcatcttaagttgttttgcaattgaacgtggtagacctaactgctactctaagcggccatatatttcctcggcctgttcttgagtgcatcgctcacaggcgcaagagaataggaagtcttctcgcagcagcttttgccgtgctttgaaatctacatatttgcatagatcaaaatagcaaataaagcactcgtcgcctgcggcaagatcttttgaggtagtcaataccatccgcccattgttgtctgctctccagatgacctaggatatttgagtatgtttgaaatctagtattctcgaggggtaacttacatttggaatgcaggaatggttgactatagaggctcttgggtagatacccaagccataatccacgcctcgttcgattggggggtccggaatgggaaatatcccagtgtcacttggatatagcccgaacgaattagactcttctttgcagatgagatccactagatcatcaacgctaaggtctgactgattatcgtgagttagatatacctcaactagcctcttccagtgcaaaatctgcgtctgaggccacctctcccggttactgtggaggatctcaatggaatcccacccccgcttgaaccgatcttcccaggaatagagctcagatggcttgaaccctgcctgtaactcaatgtaccttccagctagaagacgcatgactgtccaaagcatggcaaatgcatactggccctcgttttgacgaagactttctccgtagtttttcaaccaagcgcattcaaagtcatgccgagcctggtctgccgtccgacaacgattgtcacaccaaacaacatcccggatgcaattcctttggcaaatctctctatgtgtgtcccgtgacacttgttggcggcatttcaggttactgcaaatcgaggcatcaggatgggatggatccgcagacgggatcaaagcatatggtgtatctgccagaatcatggtaccggctgacacaaatgccgagacttgtagcaatcttcctttgtgaggattgtagctttgtgtcaggtttggatgcacgtagatatccgcgtcttgctccagagcatcgacagctgggggcttggcagctgtggacttgactggcttctgtgcaacgatcaactgcctgcgttccatcatacccatgtccacagggccgtctcgcttggtcgctgtgatctgcatcccatcttctgcttgaaggaataggccagatctttggagaaggttgtccatttcctccagatcgtaaagtctgacggaatagaaaagatcttggcggatcgaaggaccttccaaatcaatcacaatctctcggctagcgaggagggttttgtcgggagacagctctcgttcccggcaggccagaagtttttctttgccctcaagccattcccatccactttgactgaagttggatcaaatccatgctccatccacgtggtcaatgacgaaaattcctcctggtttcaggacccgagaggcctcccggagggactgtaggtctccttcatcattacagtgtccaaaagaatttcccagaagtatgaccagatcaaaggaacaatccgatgcaggaatccgacgaaggtctcccttctgaaacgtgacgttactctgcacgttttcttctattgcgcgttttcgagcaaggtcaaggagatatgtgctctgatcgatgccgtaaaaattcaccgatggaaagcgtttggcaagattgatgctatgtcggccttggccacagcatagatccaataccttgatcgaagattcttgggttttcaacagctgttgcacgctagatattccgatgatgtcgttgcattcggcttctgtgattgcggggacttcgacacagtcaccatcggtgtagaggtacatctcattgtaggccttcttccaccaatctttctcgatatgaggaaacaatgaggcaacacggccaagactaggaattgtcattctaaagaatcttgggcagtgaaaacaatcagagacaagactgttcacacggtgactatttatacccatttgtctgtccatgtggatatcagttttctgcagggaaaatattccctgcgcacgggtcttcttgatcttgcgatcttcatggcgctaatgatcgtgcatcatgcatgccacgtcatagaggggtcgaatacgagctatacaacatacaaagggcagcatagcaaaaagattcagctaagctagcgaagtggacacaaatacatctaacgaatgaagccccgagatggcaaacaccaacaagaatactccgggacgaatcatgacgctcactttgggctcgttcggtgtagttgacgagatcccacccctcgtttttgtctgccatttcacaccactttgatattcacacgtttgaaagatgggggctttaatagacagacactggcgcgtgcttatggcagtctgcacattaatgtgggggatttactttagtacctctatcgacttttcaccctgggagcacagctgattcgtccagtttatgatcttcccgcccccctgtcggtttcattacaggaacatttgttactttcaagctctcagtatacgtatttcatctctgcgctttatacagcctacgcggcacccaacacgatcctgccctttttctcggggttcgctgtacagcgggtagggaaaagaacggttctcttggctaccctcacgagcgtaatagttggccagttgatcttcgctgtcgccactcagttgcgactccagtctgggatgatgattgggcgcgtgcttattggcttaggcggagagataattggcgtcctaggaagtgaaatcacaacgcgctggttcaagtgagctccgattctatcaaactcggggtgctgctaacatctgttgctcagggacaaggaactatctttggcgctgtcaatggttctgtgcatatcgagactaggctccgtcggagcctccgttttcgtccccaggatggtcgaaagctttggcgtggtatgcgttgtatggatcgggtcgatagtgccattgggagtcgctgttactggtgctttttatctactagccgttgacactacaacttcgcaccatgagagtgagaacattgattcgataaaatcgcttcgtcggtttcccgctatcttctggcagttggccttaatttgcatactgggctacggaggtatcaatactttcactatctctgcgcagcggttcctagccgcatggttctacgatggagatcaacgcaaggctggatttgccacagggtaagtcaatttaccatcacgctgtccaaagctgacattgatcctatctagtataccatacttcctctctgggattctgactcccgtatttggactgttgttgaatttgccatggtttcgaagctacccgggggcccttggtgccactaatatcctcatgatggcagcgcatcttctattgctttatagaataggaccgattggaccgatgtgtatgttggggatagcgtttgcatcttatggtgtggtattttgggccgggctcgcgcgatgtctcctctccatcgtcgagtcctgctcgtcaaagacaaatatgccagaggccgggtgcagagcttcagatgaactcgaatatgggaccattcaactcccgacacaactctctgatgatcgctctgatgctgacggagataacttgccgggggagacgggtgaaggcatcatcacacttggctatggaattatgaccagtctcaatagcctgagtacggctgtggttccgatcctcctcgccaagatagagaatgccgtgggctttacaggcttgcaggttttctttctcatactatcattactcgggcttttcgcatctgttgggttgtcatggtcttggaggatctagaaggaatatatgtcatctcgactgctatgtgagattccgttatctctttgcgttgcactactacttcaaatctagtcgcttcatgtcataaacgcactgtcaacgaccaagatactatggcctacaatgttgtatctgcatgggcttatgtagcctttaaaatcctcgcattaagtcatatgtcaccaccaccaaccaactttgtgtcaaaactagactagagagaatgtctccgaaatcaggcacttcacaggcataggctcaggcatttacacattatggtgttgattattgaacaggtggatatatcggcaccaaggcaagtctttttgaactttgtaaacaatattgatatggtgcctggggtgatcggtgggcttaaatacccagaataaccttgtgatcggcggccttctcctcgggctcgccgaagatatcaacgttccaacgaggcttgttggcaacataaggggtgttgtagcgcttccggttctggcccaaagcgctgaccttctggacctcctcgggggtgagttctatctccttgaagttgtcacggatgcgcgaaggcgtgaccgacttagggatgacactgtgtccaccgacttgagaccaggcgagactagaatactgttagctttcatggaatggtaccacagaggggttggtaagatcttacatgacgtgggcggggctgacttcctggccagtgcgctttgcaacggactcggcaacttccttgacttcggggcgggtgatgagcaggggaatatcgaactggttgttaccaaatgcctagaggctggatcagcattgggtttctcggcaatcaaccaaaagatagatacgtacagagtaagcagtgacatggattcccttctgttggcagtattcgatcaggtcattgctctgaagcacggggtggcgctcgatctggttggtggcagggacgacgccggtggctttgatgagagcctcgatctgcgagggtattagtttgtgtatggcgagtttgggaacaaggaggatacgaacatgctcaatcttgtggttggagacaccgacggagcgagccttgctcttggggagctgggtcatggctaagaggagttagtcgggtctgagttttgttcgcacaatatatccacgtacccttccaggtgtccacaatagagacaccatcgtcaatgatcacatcaccaccctcgacggtgctgttggcaacgagcgggaagtatgaatcgcccttctgaaaggcaacgggccagtgaacaaggtaaagctttgtctgtcagccatgtctcacggtttcactaaatgggatcatcatacgtcaagataatccaactcaagctcggcaaggcaagcatccaaagaggcctcgacaacctccgggcggtgctggctacatgtagagtcaataaattggtagtctaacaatggagttcgagatatcgtacgtgttccatagcttggaggtctgcaacgtgacacgtcagtttgtgaaatcatgtaacatcccaagttggtatagttcgacttacgatgaagatatcctcccgcttcagaccgggaacatctttataagcacgcttgatgccctcggcgacctcacgctggttctggtagctgtaaacaggcggtagcttgtaagtatggtgcaattgtaataggtaatatttcatgccggagggattggtgctgcatacatcgttgccaaatcctgagagaagtgcgggttagccaacagtccgaagcaatgatagatgaacatgtacacaccaggtggcggtagccagccttcagggcctcataaacagcctcgccgaccaggccaggagcagactgccaagtaccaaatcctagctggctggacgtggagtcagtgaagtttctcagtattttctaccgaatatacgcacgggatctggtggccggtgttgagagtgactttcttgccgagagacatgatgtttaaagcggtttaagaatagtttggaagaggaagaggaagaggaagagaagaagatcccccagtctttaacttgttcagttctccggcggggcttctggactgtcctatccccgcccatctcggaggagactccaccgaggtaaatgatggatgttcgaagctgaatatagagtatgatagaaaattcatttacgtctatgtttgcatattcagcttattgaaatgtctactgttgtagcgaatatagagtgcgaatatagaggatatccttgtaacctactatatacttagtacaccctacatagacggtatatctaagagagaccgcggggtaagttatgatgtcattctgcgaattccgggattgaactcttgtggctctcatgttctttcatgtcgtccattttccattatgatttcttttacatcagcagtttggtcaccgtgtggtgttggctatgctctcggatcgtccaattgagcccgcaatattacgctgcggcgtcacccggccgagaatggtacaatatggcagtgctatgtcaccatcgtttcagtttcgaaagcatcgaatcgcatcgaatccccttcattatccttgaacgtgtccacagaagccaagttgccctatattaaaaataccctactccgggcccatgaataccctcaaaagttcgggataattgggcgcacccaatccactcactggatcccaaccctcggtcgcagagaacccctcggtgttgcaacccgggttggtgcccttggtcacgtcaaagaacgcctccgggtgggcgtacaatacaggattgacaaagccaacagtggacttgcccgcggccagtcgctcctcgttgatgcgcgtgaggattccagcaaacaccggtgcagaggccgacgttccaccaatcgacacggcaattcccctgtaatagatgatgaccttgtcaccaatagcagcaacgtctggataggcacgtccgatccggttgtagataccgttattctcaccgaagctgctgttgtccacgctctcatagtatgggtatgagggcttggccttgtcaaagtaatcggcaacagcctgggcctgatagtcaggcgccttgtaaatgttgctgaaaccgccgccggacgggtacctagacacagcctgctccttgtgatctcctggcgcagaacccgtggggatttcagtgcctcccaccgcagtaaggtatggacaggaggcaggaaaatccggagtaaagattctgccatcggggccgaggcagttgctgggggtagggtcgcctccgcgtccagccacaccagaatcacccgaagcgaccaccactgaaactcccattgtacccagcttcatgaactcggcacattgtcgccgctgataggaaatcgggaggtctgcttcggcggagccataggaaatcgagatgaccttgggcgggtcgtacaccccacattgcagggagcccttgtagcctccgtctgccgggtcgggatatggagggtccaaaggcgagatggtactgcagtacgagccgtcgatggcgtccaagaacgtgttgaggaagccattgaaggtataatgattctcgtaatgcatatcatcgctttggaaaagcacggagttctgcggccaaataatcgggtaggagatttggaagtccaggttggattcagccccagcattgaaactgtccgtaggagcctggccaccatcaaccgacttgagagttgggtgtgtgccatgggggattttcctgctaaaaagtcagaaatccaatcaactaggaatttcaattcaacgcgacatacgagtacaagttcgagaagaacaaatctaaatcttcctgggcgtagacatccccggtaccctcaaagactcccaattcattcccctttgtagcagagtggccttcgctaatgttatacatctctgtaggcttgtcaacacatccagcttgtaggtattcgtactcagatcacttacgttgaatgcattggggtgtaacgactcgggagcaaaaggatgaagcctcactcagcagctcctcaattggtatgaggatcggctcaataatagggggagccccatccacgacgcgtttctgcttctcagtcgatctccgtacaccagtcacctcccgcatagaaatccctggagtgacatagtcgacgtgctcacgcacggagctcgggagatgatatctatagtcaggggtcagcgagactatagatccaatccaaatgatcaatcttactcgcgacaggccacatgcgaccggcccgtttcagcatgtgagtagatatagtactctgtgtccagcaaattctccagttccttggcatcggcatcaaactgaatccattgcttgttggctgattgcgtgatgcggtcttttgcaataccagttgattccaaccaagaacgcacgtcattcacgctctgttcagtcggggcaaagaggtcgtgcacttccctgatggacagatgctgtccatagcgactcgagtatgggttggacctagacagatgtcaattttgcacggtggtagattcattgcgcaagtccacacaagtccataagtagctcatggccatagtcaaggttagactgggtcaacccgattcgcacaggtagtgacaacatttccttcgagcttcttgccttcaacccaagattttggaatgaaatcacgacgctcgtgcaattgataattatgagccgttggtactgccatcacactggccgacagggcacaaagcacaatgaaagatctcatcgtaatagtcttagaaggagttagctaattcagcttgctccttcgaacttacggatcatgtgggaaagacccgcgtcggacaatgcatcctttatagcattcaggtcgttcatttggactaaacccacccaagaggaaggacagccagttgaccaacgatgctaagaccccggcaaccaaacagggcaaggatagagcttatcctgtttgccattagcctgtaatgatctcgctaagggttgaacatgccattcataacgtgaccataccaaatcaacacccctcggaaagttaaggcgggtcacacggggtccatatgaagggttgcgttcttcggcaagttctcaaaaaccgcgtcgttacaacccatcaagtggacgagattcaagacacttagaaacatgtatcttcgtcttcggtcgtagaggttccattgggttcaaacctccgaacatgatcctagcaattaccgatatgagaacaatgacctcacgcgaaattaacggatcaccggtgttgtacctcgggaaaaaaactacccctgagagattgactcgcaaccagtacatgatcaaacgcacaaggcttggaccattagacgtcgaatgtcgaatcataaccaaaagatttccggttctttggtgccgaaatgaggtcgttgctactgtacattcggaaatgttgggaaaaacttgaatcggttcgggaccaagatcaggcttgaatccactgttgatgttaaagcatcatcttgcaattcggtgggattatcgggggatacttgcccaggtggtcaaatggtaaaagtccagtcttatgcactccacacactgtgcatcaatttacgatttaaaggattggcggctattccaacgccatggacactacgggggaccatgcgagtcttgcatcgcaaatatcatccatacactacacggctgcctaaactccgcagatagggatgatctcatgagtggtattgaagagttgatacagaagaccacccaaggctgcataattgcaacgtcggtggcagaaacacggttgcatgtgccttttccaggcagaagtcatgcgagcaaaggatggaagcccttggggtatctcatgtgcagagaactttatgtcggcggatggcattgccgtcgatgttcgggtgcaggttattagcggagaactggagatcaaaatttgaatgaactcccagaaatcccagaactaaagacataggcagactgttgcctggaaggttcaggtgaaaatggcggcacttctgccacatcggtaaggggatgtggttgaaaattctcaaactgacggttcgaccgcaaggtctctcgtccatgacactgacacgggtatatttcaactgccgtgccttgagcgcatcaaaaggcggcctcaaactgacgtgatattcgagggcacaattcccttctcaatttgaaataaccaaccattcaggatccacaccatttccataataaatccaccagctgctgccgatgcaagggcttggcgatgtaatcgtccatccccttcgccaaatacgtctctgcgtctcccttgagagcattgcccgtcaacgcaaggatgggcatatcgagtttcatccgtcgaatgtgctctgtggcggttaatccatccatgaccggcatgctgatgtccatcaggatgacattataggccaaaggcttctgcttcaccatacgcactgcttccgctccatcccaggcagcatcgacgcgcttgaaacccaggctgctgagaagttttaacataataagttgattgaccttgttgtcttcgacaaggaggatgtgtttgtgtggggcgatcttctcgagcgaggcggaattatccaatgcctcaggtatagccggttgcaatctctgcttcactgtagacactggcgaggtaaggcgagccattttggctgtcatccagaacacactaccgcgtccgtcgggattggcatggaaaccaaccgctccacccatcaattcagccaggctcttgcatatcgacaggccaaggcccgtaccctggtacctttttgtggccgtgtccgcgaatcgcgtgaagggggtgaagagggtgtttgaggcatcttcgggtacgccgataccagtgtccactacctgcgtggagattacatacatatcggggtccttttcatcgatggtataggtggcatgaactcgaacatgaccactctcggtgaatttcactgcgttggtgaccatattttgcagaacttggcggaatcgcagcgggtcacctttgaggtttggaggaaagcccgcgcttacatcgcccatgattttgacaccgggcttcagcgccgactgacaattccgaacgacagccgagatcacgtcggggatgtggacaacgtctgtgttcaaggggaaggttcccgacgatagcttggaataatctaggacatcgttaatgacctgcagcaagatagatgttgagtcttccaggatggatccgaattcccgctggtcatcagtcaattcggtcctcattagcattgtcaaagccaagagcatgccattcatcggggtgcgcaattcgtgggacatgttggccaagaaatcggacttgagcttggccgattcttcaaaggcgtcaatcaaacgcgcctctgtcgcccggcgttcagtcatgtcgcgggtaactttcacgaatcccacatggctgccgttctgatagatggcagtgatcatgacattggcccaaaaccggttgccatccttgtgataacgccagccctcatcctccagttttccttcttgtaaacagacctccagctcgcggacgggtttttttatttcgcggtcatcgcgaccgtaaaagatggagaaatgctggccgatgatctcggaggatgtgtatcccttcagaatagcggcgcccgaattccatgtcgcaatatggccgcgcgtatcgagcatgaaaatggcataatccctcacggtgtcgaccaagattttgtaaatttcgttgggataggcatcgtcgctgatggaattcgaccgatgccggtgatgtttgatccgctgggcttccagtagcatgtagatcagcgagtcatcttcaaagatgggtgtcacgctaagtgagaagaaagcgtcgacttttgccacgtgaacacgctggatgacctgcacttcgcgagttgatatggcagtgccaagagccccgatcagggaggcgatatcgggggctgggaggatggaggggggaagatcgtagacattcgctgccaacagttggtctcgtgagtgcttgaagacttccacatgactgttggacacttcgacgattcgcagagcgccgtctaaaacgagagtcggtttcctacaggggttaacgggaataatccatgctatccctccaaggggttcgggttctcacggtgtaaatcgatagatgcgactcaacgatccgacaacgggctgttcaagggatttgttctccagattcaagtcactctcggccggaggcgtgatcaccatcgcgacattgttcataggacagtcgattctcaggtggagcatctgatccacaggcatattgctaacagcctgggaggaagtgaggatgtcattcaagaagattttcagaagcaataaagggataaggatcaggatgatcagtccaaaggggaaaggctgaagaaagtcaagagggaaagttggggtggacgggagaaatgcccgggactggactttttccagtgcaatccaggccaaaggtggataaaagaagaaaaaacaaggtcaacaatgtccaaatgagcgaaactgatgttccaagaaaggcaattcgatctgctttgtagaactgaacttgtagaacttcatggatatcccctaaggtatatgaagtgatgtacgtcattcgctgtttcaccacatcgaggggcaatggaacggaaataactcggtatattgtgaatggatgaggctcgaagtatctgatatatgaacgatatgcttctacaagatcacagtctcatgctccgtccgctctaccatcttcaccaacgcatcggcaatcccatatgaaaacgcatacccacctcctccaaacccatacgcggagagcaccacccgactaccctttcgctccgaatccaaacggaaccctccttttcgggatggtcggatcccaataatgtagctcaccgtatctgcagctgggtgttcggggacaatttcaggcgctaaccgatgcgcgcgtgcaatctcatccctcgcgatatccatatcgacttcaggtgacctagggaggttagagtggatcgttttggagatgtggggatgtccatacagattgtcctgttgcttcaccccacccaggaccacccccttggatagaggccgaggaatcacataggtatattccttgccatttcggaagtgaagtgtgttgcattgatcagtggccagaaacacattctgccctcgctccggaaaacagttatcatcttgcacatccgtcaaggttttactgccccagccgcttgcattgatgaatatccctgattcggggaacatgtcatacagttcctgaagagactcgacacgttggcggataaagcgacccccaagagactcaacctgttctctgagataaggcatatgtctcgtaggatctgtaacaagcgtctcataggcccaggcacagttgaaattgggcgggtattcaccaggactcatctcgcggaactaaaccggacagaggatgttaatatcagtcaagcgggaagcacatggagtacgcattaccttggatactactgtcttaccccatatcgccgagtcaggagcaggtttttcttcgaggtattctcgtgcgttgacaatgctcacccctgcctcggggccatcttgtgccatcttgagtagtatgcgatgtgtgacagcttgaagataccgttgatccggagtaatacccccagcggcatgccacgctgctcctgcccaagccgaagcatagtagatattctggtctcccggtagatattcggccaccaataccacggggaaaccattcagcagcaattgccgagcagttgcacaaccaatgatccctgcaccgaggattataatgggtctttgagaaaagggcacctcgttggtatgaaattggtcgtattcacccatcgtgaggcgggtataaggttcaagtgacgaatgatatcagaggggctcggaggatgggaaaggggtcaggtcaacaacgttcagggtctcaaacttgggatccttcaacgcggcattgcttctgtttagaattaatcattcaattaattcaatcattcaatagcagaatgattttccacccagtccaagctatatctcactccggcaataattaagtgggtctataacggcctcttccgacgtcgcatgcccgtcagtccctttttttcccttcctatctccattcgtccccgttctacccaatcccattgaagagaacgaaatccaagatagaagtgatgtgctagatcccccgatgtcccttcttcattggctattttgttagctcgcccgtggacatacctgtacggagtactccgtatctggagacacttcatgcagccatcggtacctacggagtcgtcggtctgacattcggcttaagccgacttaaacactgtactgggtttagctgtggttccctcctttctcagcataggggaaggctcctgcagaggaccgggttcaggatggagagggcccagaagagccaggtgagtgtccacttctaagctgatccagatatatcatatcccccatatatattgttattaactgtttcacatctcagaaatccccttcagagcaagatagaattgacgttcttcacgatcgggatgccgaaaagatcttaccctatgaagccgatgattcgccttttcccgaggtgcgggctgtcatccagccagtcaatgacttgacgctgcctgttaacacggtccgcatgtggactattggtattttgtttactatcgtgagtcttgttttctatgcgaccggacaattggcaagataactaacgtcgacacaggtcggtagtggactgaaccagttcttcagcttacgacagcccagtgtgaatatcagtgctctagtagcacagttactcgctttccctctgggatgcgcctgggcgaaatggattccccttggggtcttgaatcccgaccggcatttcaatatcaaggagcatgccttgatcacaatcatggcaaacgtctctattggctctgctgctgccacccaaattatcgaagcgcttgtcaagttctataatatgccgtcacagggtgggtttgaagtcttgttgtgcattaccacgcaattgtttggcttcggcttagccggcatggcgtcgcgctggctagttggcccagcatcgatgatttggccgcaggtgttgtcaaatgccgcacttttgaccactctccattctcgctctaataccatcgcagatggctggcagatcacacgtcttcgcttctttctttatgtgttcgtcggtggtgccatctggtacttcgtcccgggatatctctttacgggtctcagcacattcgccttcatttgctggattgtgccattcaatgtggtggtgaatcagctctttgggcaaaccaccggactagggatgtcggtattgacctttgactgggcccaggtggtctatgccaaccaaagccccctgcttgttcccttctgggctggccttaatgtgatgggatcatttgcactcttcttttggcttgtgtgccccctcgtttactacaccaacacctggtattccgcacacttgccactgctcaattccaacaccttcgataatactggaactccttataacaccagtcgtatcatgggttcgagcgggaggatcgaccaaactgcgtatcggaactattcgcccatgtttttaccggctggctatgcaatcacatttggggttgcctttgctaacttgacgggcatcttcttccacatcgcgttgtatcatgggaaagacttgtggcaacaatggaagggcactagcaaacaagacgtccatattcgactgatgtcttcatatcgagccgtaccctggtggtggtttgctgcagtaactgtcctgatgtttgtcttgagtatcgtgaccaacgaggtgtggcatacgggtctaccggcatggggtgtgcttgtggcattcgtgttaccagtggtctactttatccctgtgggagtcatcaaagcgctcacaaatatcagtagtaaccaactgaacctgctcacggaattcattggcgggtatgcattcctcgggcagcccgtggccaacatggctttcaaattctatggttatgtcgccgtccagcaaggactcgagtgggttacatacctccaaaacggaattggcattgattaacatcatattagatttgtcgccgatatgaagttggctcattatatgcacatcgccccacgccttctgtttgtagcccaaggccttgccacactcatcggagctatcgttcaatgtggtgtgacagtgttcatgatcacaagaattgatggtgtatgcacccctgaagcccagggaaatttcatctgccctcatggaaaggtcacatattcttcgtctcttatttggggtgagttccatcttattgtcgatgttctaccatgtcatacctaatcaaccttcaggtgctgttggtccaggtcggttgttttcttccgggcagatatatagcaatctgctttggtttttcctggtcggacctgcggtggtagtcatcacctatcttctaggtcgtcgttggaaagctgccaatcatgtctcctggcccgtcgcttttggtgcaatgagtctagtcccacctgccacaggtatcagcttctcctcgtggtggatagtcaacttgatattcaatggcgtactccgtcaccgcaaacccgcgtggtggtcgaaatacagtatgttcatggtttccctttcatcgttgattcttttgctaatcgtccgcagattatgtactatccgccgcgctagactgcggcgttgcagtcgctacagtaatcattttcttttgcataactctcccagctggttcgttgaactggtggggaaatgctgtgtcgaaaaccacagccgacggcaaaggcacgccctacatgggcttacccgcgcatggctactttggccccccaaaaggaacttgggagtgatcaggaatgtctgctcggcctcattttagtgtgtttctaccatatattgccgtaattaccgtttgttgggtggactttgagtatcgcgtcagtccagcagatccggatgatcccacagatatcaccctcgccgccctcgcaacttgaacaatttgggacggtcggatcgatgcttcctttccatcatcgatagtcaaaatcagtttatcatttccgaaaccgcgacgtcggtctcggtgctaagtaagacaagtatctcccgatatggacattggatctgtggggtgccctcataccatgaagttctcacctcaaaggattcttcgaaacatcgagaccgataacatgactataatgaccacgatcgataccgctatgtcattcgcgattcacctgtttccttcgtgaatcgtctcccggaaaggggtcattccgatcgaattgtcaacgcgaggagcagctgagacaggcttgtgtcccaaccccgtaattattgttttcacatgagtgaaatttggctccagggctagctgtatcatgaggaatttattgtcatgcccatttcggcctttccgaacgcgtttattgctttccattcccagcaaagcccgacaaactcagcattaccaaaatcaaattcgcggctttctctgcacggctgctcttatgtctcactctcccaaagatgactcctcgcaacacctttatgagcccatcgaaggagtggaaaaactggaaagctatcgcgtggggggctatcactccatgacgatcggtgatcatattcacaatcgctatcaggtggttcataaactcggtcatggcacgtactcgacgatctggctggcctgagatcaaaaagatggcaaatacgtcgccatcaaagtgtgtaccgcggattcgaacccgcttgaattcagcgtcctttcggaactttccaactcgcaacaaagttcaactgctagcttgaagacaatgataccttcagtattaaatagattcgagattaaaggaccgaatggtacgcacgcctgttatgtgacagtcccggcaagaatgagtctctccgaggcaaaagatgcctcatagaaccgccttttccaattggaggctggtcgggccttagcagcacagctattccttgcagttgagtacgtccactcccaggagtttgttcacggagatcttcattttcctccggttgccatttgacctaggccaactttctgtggagggtttgtacaaaaagtacgggaaccggaattcgaagcagtaagacccttcgatagtcaaccgcttccaccgaatatgccatcacgggccgttttaccaatctggctgggtgaggcaagcgataaacttaaattcccagaagccaaaatcctactcggcgctctcggtgaagccttctctcctaccaagcaacagaggtttgagtcgcacaccccgcttataggccgaccacgagaggctcggttcgaaccacacaagcctctgtccttcccatcagacatttggtcactcggatgctctttatggaacatcataggtcaaagctcactttttgacggcatgtttgcaaccgaagatagcatcactggtgggcaagtcgatgcactaggtatgctacccccggaatggtagtacaaatgggaggggcgacatatcagattcaccaaaaatggaaagccgatcaatcgggacccttaccggtcgtggggggacagatttgaacaagatatgcaggaacctcgacggaggaaagggatgctatttttaagatgctgaagtcgatgcttcaattcaggcctgagaatcgctcacctgcaaagcaaattcccgaatgtgaatggatggtcaattgggctttacctgagtacgcgaagattcgaatgatatgagtactgtaagctctctggattctctgtcaatatctaggtatacaggagtcgaaaatggtcttttggatacccttgcagattgggctacgggggggttagcgtttatcttcacatcgtagctcatgaatatatcatttctcatttctcatttctcataattcaagacaggccatcaaactttcactgaacgtccgctcacatagactttcacaatattccggtcatccccagtcatcagaaacttctcaaatattacctggatagtatcttcatcttcaactgggctcatcactcctggttggccaagatccgtggtatgaacttcgagcgcatcaaactctttgccaactgcaaagttaccgacacggtcatcgagaccacacacttgcgctccacctagagtggcaagaaagaaggcctcgggcaacgaaagtgcagggtctcgtccttgggtcaacttctgctgcgcattcgacacaatgaaggcctgtttcatggcatccaatatagacgacgagtagccaccaccactatcagtgcccaggcccaccttgataccgcgacgcaaatactctcgcacaggtgcgaccataaaatcttccatggtggtattggcgattgggcagtgggcaactccacagccaagttcttggatgcgacacatctctccttcttgtagaaagatacagtgggcaagaatcgatcgattattcaacagaccatatcgctgatagagatcagcttccgtatcaaactctggaaagagctgatgcgtgaactcgatttcctgcttggcttcattgaaatgcgtttgtattggaagatcgggatgttcacgggcgatggcaccgaccccatccagtaattccggctcacaggatatcgcaaagcgtggcgtcagtattggtttcaccaggcggtattccggatcaagtttctgaatatgacgaatgagttcacgtgtttcttgcaatgagtcggacaccgacggatcccgataccagtccggggcattccggttcatattgcacttccccaccagagcgcgctgtcctttgtcaaagcagacatccgccaagattcgagttgcctgcccatgatgtgagccgtaatatgaggcggtggtaattccctgctgcaagaagcccgtcacgcaagaggagtacatgcgtttggcatattccggatcttggaacttggcctcgtgggcaaaagtgaccttattcaaccagtcgagtagggaaatccctcttccgacgccacgctgtgcccactggggtgcatggttgtgagtatcaacgaagccgggacacagaaattccccgcgcctgagatacttcactgggaaaacgtcggggacatggccattttctgaaagaatagagttgatctgatccaattccacatttccttgtaacgcctgaatcttgccatctgttcccacaatcataatgcaattctccaggatctcgaagtcatccagacttcgggaatggattaccgtgccgtggaaggcgaggggcagcccagagaccggcgtggcgttcttgtcgagctcttccataatacacaataagatgatataataatcaccagggattatttgcgaatgatgggtgtagttctgtgaaatgtaggagggggatagatgaagataacaggtttggaggtgaggggcattaataatcggcatatgctgagatgaggtgaaacagcctgcaattgtgaagctccttggcagaaatccatgagcctgctattcttcaatctaaagagtctattcctttcaattaagtgggagtcttgagtttgtatcaatccatcttcatctctgtctaggtcatcacgaactatataaaacattaagtcgcaggtactaaaacgattcttaatctgatgaatctggtatgcttttagttgcgacaaactaatattgattaacatgaaaggaaaaagcctggcccgatggaaaactccgtctacgtccggtagagcacggtttgaatatagagaaagagattcgttcaaagggtatagtatgatgccatctcctcctgaaaccaattgtaggagtagaagagttgttccgccatctgtggatcgatcatcggcacagtcccactcccatccacgagcaacacgtcatcgagaactggagcgagtgggactgggggtggagggggtgcggctaaagacatcggatgagctgggagcagtgcaaatggtggaggcggtggttgcggttgcggttggtaatggtgttgatgttgtgggtgatggtgatgttgctgctgttctagttgctgttgctgataggccatttggctgaagatcactgtgctctggtgccggaatgtctctgccaaccggtccaccccaggccgacgcttgccaaattcttccaacagtacgacaacggcctgaataccacgtcgcatcgtctgctcttcgggatgccagggggcaggctgagagtcgcgtaatgagcgggcattctgctcaaggcaccacaggatagtgataccagcaaaataaacttgactcaatgttaaccatatccattttagcttgccgactgagtagctgtcccaataggatcgaatgacttggatactagattcaccacagctgatgatactggttatgtcgggcgtcggattgcgggggctggggcggtacatcaagagaagcgttgtgtaatagagataatcgtaataagaggtagaatagagaagtgccgatgggtatactggagctgttatgcgccagtcatcaacctcatggcggaatcgactaagtgtggcggcagcttcttggggacacagtcgtggcaggctgctatatactacagaggaaacaattagaggaaaggaaaaaccagacgaaattctcaagacttcacttacagtattgatagatgcgtgaaaatatccgccgcagacgtgtcacctgcaagggaatcgtcatcgcgctcgcgccaggggcttcggtttcatcgtcattgagttctcgcagaagacccacgctaatatcgtcgtccgcaattcccaatggccgacccaaggtgctagcgataaggcgatcgagattgtaaagactccaaaacgcgcgctttgccatctcctcctccgcaatgctagaataggaccgtgttttgtgcaaacccatactaattgacagcctcatcgtcacacccagcaaatgccaaatgctgggaccagcagtcgcaaacatagtatacaaggacaatcccagcagtgcccgcacagccggtaagtcttcattttgcaatgccagtggcagcgtctcctggctggcatggtaaaattcagctgcctggatcggatccgcagacccgatcaggagggaaatggcaatgacgatgtgataagaatgatgcgtttctggagatggaacaccaccggtatagatatggcgcagattggccataaactccggacgagacaaaaacgggtactggtatcccatactatcgaaatattgtccagccagccgttccgcttcctccagcgacgacaagcgcataactcgcggggcggaggaaggtcgtgcgaccgacggtcggcggtgctccaactgatcgcgaaagatctcgccgatgttggggagttcggtgcctactccagtcgaggcctccgagggtcctgcagtcaccgacgaaccaccactgccggcagggcttggcattgaggtggcacgattacccccggtcgcaatcatggcgggcacctgataccaccaatccggatctccctcgccatcgactggtgttcccgtcggcaattccgctaccgagaggcccgacttacggcggacgacatcctccaaccatcgtactcgtttttgtaaattctccagctgatctcgggggacggaggcgctagcgacctgaggaccgggtgggggtatggtgcaccggactccggcgcgggtgcaagcggaacaattggggtaacgaaagtcgcatttcttcttccttttgcgacaaaagtcacaggccgtcgatactcgtttgctgcgagcatgactcgaaacatctatagactcatgatgaaccggcggtggttgagaccaggttggagtgtaagtattaatcgaatccaagcggaattttcccagctgatcgcggaaatccttgtttccagacgtgctcatggtcaggggccacttaagctatccatttcccaaacatatcgaccaattgtcattgaaggaaacgcacgttcatcgaaagtgtactttagtgctgttgaagaagggaagatatgaaaagtgggggggccccgggttactttcgcttacataggcgaaacgctgatctgtccatggccgaaagagttatcattctgcgagattgtgactttgggatgattctattaatctatatggggcacggggtactacctaagtatctctgcgtttatatttatcgagaatggctgggactatctcaatatccctgtttcgtcaggcttatcttcaggaattagggttactttgcatttcccggtctctgaagacattgctgcagagctggactatgaggtcgaggatcatattgaaaatgtttactgatcaagctccaggctcttcaatctgatatatccctatccttcttaccggatccactgagccgtgccaactcccgggtgctatatacgagccgttgaaacagtaaaacaacatgcaggaactgatctacatagtacatacctgaagtgggatgagagcaacattgaatggaccctcatgtttccactatacaacgttactacagcactgcatgatatccccgtgttatttgatggtccccgatgatgcaactacatggagcttctttgcctggaaaacacataaataagccctcagttcccctcccaaaatcttgattaccgatctcaactcactcaatacacttcttcattcactgtccgagcctcactctcgctttcaagatgaagtttaccgccatccctctcctgtttgcaaccgctgccagcgccaccgtccagggcttcgacatctccagctaccaacccagcgtggacttcgctggtgcttacaagtctggcgctcgctttgtcatgatcaaggtaggctttcccgaattcacaaccgttcccttctcagtcccaatactaactatatcaggcaactgagggtaccagctatacctccagcactttctccagccaatacactggtgccactaacgccggtctgatccgtggtggttatcactttgcccagcccgccagtagcaccggtgccactcaagccaagtacttcatcgcccacggtggaggttggtccaatgacggcctgaccctgcccggtatgctagacattgaatacaacccatccggcgcaacctgctatgggctcagccaatctgccatggttgcttgggtcaaggactttggcgagacctacaaggctgccgagggccggtaccctatgatctactccaccgccgactggtggaacacttgcactggtggcagcacggcattcagcgcggactacccgttggttctggcttcatacagcacctcggtcggcactatccccggtggctggccttaccagagcttctggcagaacaccgattcgtatagctatggaggtgattccgaggtttggaatggcagcgaagccgctctgcagacctttgccaagaacgcttcttaaatggagccaattggaccgagaatttcccacaagatgtatacttgtatgtatctattggtttttgattcgttttcagatacttgtgcagatcacccgttcttgcctctttgattgaacggcagtggaattgatcgtttttataccttcccagacgggctagcagctcggaaatgtccgtagatttcctagatcgctaatccttgtaaagaaaaatgaagggaccattagacaataaacccgggagctgatgtagaatgtgtgtcttcttattggctaagccttcttcttaattaggtctaatttcaacaagtctccctcggctttttacgagtcgccccgagttggaatccgataccggacctattctaggcttcgacagttttgacttacagtaattgagggcaggttcatgccactaccaaataagcatcataggtaaaaatgtggacagttaactaaatatctagctactatgtcgttgtgactcattcttattcatcatgacggatccactccggcgctcggaaaggcaatgcaactatacggggtaggcatcgtatacttaaatcgttacttgtctagacaatttgcttctaatgcgcaccaaagttccaagcataatgtcatatctcattttaaacacagatggctttcttacgaaagatctttctgtcgtatatcttctgttgacagccctcttgagcttccttgttgtcctcgcatggcgtcggacggaaaaaccgacaatactgattgtcaactcatactctggtgatataattttaaaagaggcacagtcgacattcatgtcagatgccaggagtttgatcaaagaaggaatccagaaggtaagttgaagcttccatgacaaaaatgacatgacactgcatctaatgtacacgcttcagttcaacggaccatttcgcatcataaccactcttggctctcggttaattctcccagcatcatatatagagtggctgaaaaattttccggatttagatcatcaagcgcttgtccacgatgttgcagctccctttactaacgcagggtgggaactgacgacacacgatttcatatagcaatatttcgcggcataccccgggatggaaggacagagattggtcactgatcccagaaggattctgatcaatgtcacaaaaacgaaattgaacaatcagagcagtcgtgggtgacagcctcagggcccatgatgcacgttgggctctgactaacatgacctttcatcacagagtgtgggctgcttcatgaacatcttacggaggctcttgacaagacctggatggatcacgatggtacttttgctctatattttgctggaacgtttgattaacttattcttcagactggcacaccactgattggtctcaacatgcagtcggcttcattgggcaaatgtcagcatctgtttttgtcggtcctgaattagctcgtgatcctaagtggcaagacttaattatcacttcgacatgaatacctttatggggattcgatctctccgcgcctggccggcgtttcttcgtccatttgttcattggtttttgccagaactccgaaagtgccgccagcaaatgcgtcttgctcgtcttatgctacagccaatcttggatcgcagggcgcatgagcaatctcgctctattgagcctggtgagatagaaaaattcgaggataccatacagtggcttgaataaatcgctgccggacgcccctatgatgccgctgcggcacaaattgcgttcgcgataagcgcaatgcacacaacttctgagctactcaagcaggccttactggatattcgtatgcacccagatctgattccggctctgcgagatgaagcacagaaggctgtcgaggagagcggatggacaactgcaggcgtcttcaaaatgcagctgttggacagcgcagtaaaggagacacagcggctcaaaccgggatcattaggtatgtgtctaacccatcagtactctcatatcaaggtactgaactcactctctcacagtaaatcttgagtggaaagcgctgcaagatgtgatccttcccaatggcttgactatccctcgcgggaccaatgttgcagttgattcatccatgatgtgggacccagcgatttaccccgatcaattctcttatgatgcgtaccgttttcttcgtcttcgcaactccggtgatactgcagcagcacttgcttccatcagcccggagcacattgcctttggaattggcaaggcaatctgtcctgggagattctttgctagcaacgaagtcaagattgctctgctaagattctcttgacttatgatgttagaattgctgaggggatgatacccaagattgtggcgataggatttgaaatgctaagtgatccaaaagcaaagctagaggttaaaaagcgaagggtttgatagaaaataagatttgaattggtactatagaagactataagactgtaaataaatttccaactgagaggggaaaccctgtaataatacagtatattaccactaggccatggagggggctgatatctgttctgtttgttgtctgacagtctcccttcactcactcatatatcttctgcgggactaccatggatctcatcgaatatgccaccgaggccgatgggccaggacttgccaaagtcaacgtccaaagctttcaaggccgccgtctcctcgaagaaattttcccagaggccagcttgaccagggtgcaggaattcaaaataattatgggaatgaaacatcttgccaatcccaatatgcacgtcctcaagatccatgatccagtcagtggggagctggcgacctacagccgttggcagtttccagcatcatttggtccaagcctggttaccataagtgagaaggcagccttgttggccaaggaccccgttccacatgcaccaagaccaatgaatgaggaggttttcaatgctttcaaaaggctcctagaggatggtcgcaagcgatacaccacagataacgacatcagtaagtgacccccacattcgcgataggggtttttgctcaaatggttcatcagtcctcgatctgctagcaaccctaccggaatatcaacgacgagggtttggttctgctatcttgaaatggggcatagaaaaggcagatgcatcccagttgcgtatcttcctcgagggtacgcctgaaggtgttcctatctacctcaagtatgggtggaagatattagaggaggtggttatggattatacaccatttggaagtgttgggcaagagacctttttcctaatgatgagggatccaattttacaataagagtgcagggttcctataaagttgctcaatctactttggagattaatgtcgacataaggtacatttaccaaactgaggataggcttgaagtacatactactccaataccttcagacatgtaaatgtacatcgtactgagtggataaacgaactgccgggcacgtcatttccccagggaatttcctacacttccccggacatactctctcttccctctttcgctcccatattcatcttttacaatggctcatttcaagtttgcaatccttgacgattaccagggcattgcgcctgcctatttcactcacctcgagtcgcgagttgacatttccagttttcccgaaaccctcgatccccgcgatcctgcacaacacgatgcccttgtccaacgactccttcccttcgatatcatcttggcgatgcgcgagcgaacaccttttgcagccaatactattgcagcgctcccaaatttgaaacttcttttgaccacgggtactcgcaatctggcgctagatctcggggcatttacacgttccaatgtggctgtcgcaggcaccgagggtcgcccacccggtgtgaattcgacggttcagcatacatgggctttgatcttgggactagcccgaaatatagcacgcgacgatgcagccgtcaaacgcggtgcatggcaaggttcccttgggatcaacttgtccgggaagacattagggctgcttgggctgggaaaacttgggtcgcaagtaggaaagattggcgctctggctttcggcatgaaggttctcgcatggtcaacaaacctgacacaggaaaaggccgacgagcaagcgcacgctcagggtctgccagtggggacatttgccgtcgccgcgtccaaagaggaattcttcgcccaggctgacatcgtcagtgtacacagcgtactatcggatcgaagtcgtggaattgttggcgcaactgaaatagcaaatatgcaaccatctgcatttatcatcaatacttcacgtgggcccttgattgaggagcaggccctcctcgaggctctgaatgcgggccgcattcgtggcgccgcgttagatgtctttgacccggagccattacctctggatagcccatggcgtaatactccctggggccacgatggacgcagtgaagttctgctttccccccacatgggatacggagaggaggagctattgcgggggtggtatcgcgaaacagcggagaatttagagcggtggttgaatggacaggagctactgcgcaagatgaattgatgaccatagctatatcaatacaaacaaccgaggttgttccgagaatgtcatgttctacatgtggaggttcaccgaatgacgaatacgtacgatccggctaacagttcgccttcacaagtgtaaacggtcaaaggtcttcgttaggactcttttggcaagacaattaattgcgttgtgcctcggtcttccgagcggaatgacctcggttgaagggaacgatgtggaatgttctcttcatcgctactccgtacgtcttcgacttaataaaaccccccgcgatttccactttttaattccaaacatcttcttttctcctatcctcttctgttctcctctattaccccctcttcccttctcatctccatacctccctcaccatggccccatccgccgatcccattcccgcgacgcccgccattgccaacttccctcctccgacccatcccgaatgtctgcgcgttgagcgcagtacgaaggcatttgctagcggagcttattctctcgtggacctccccgcaggtgccgtcttcgccaagatcactacggccactcccggaaagaaagcctacacgagcgtgcaaaccggccgcgacacccacatcgaactcaactccgacctagtctactgcaaccactcatgcgcaccatcgttggtcttcgatatgggtcgcatggaggtgcgggtcgtggacgaccatcctttgaagaaaggtgatgcccttaccttcttctaccccagcaccgagtgggatatggaccagccattccagtgcacctgcggggcaggtgacgggatctgcagaggttggatctccggagccaagaccatgcccgccgaccagttgaacggatactggcttaatggccacatttccgaattgttgaatgagaccaaggccaattgaggggctggcaccccaaattggaggcttatagaactatcgaacaagacacaagatatccaaatatccgatagaaaaatagagattagcgttaagactaaaaaaaaataccacacagacgctctatactttcataacactcccgcgatcattgcaaattgaatcatcctccgtcggtcaacctctttcttcaacatcatcaaacaagtcgccacaataaccgcgtcctccagttcaagagactgtgacgcagcctcgtcgatctgcaattcacccccattgcccgccgaagatcgcgacgttccgggcgtccgagcatcgtctccgcgggccagctgtgcaatcctgtggcgctgggtctctttactcttggccttgtcttcccccacggcacgaagaacaatcaaattgactttctgcccatccgcccttctctccttggcatatttccattcaaactgtgtacctccaggtatagcaaagcgcattgagcgagaggtccatttccccgcgacagccacttcctcggggctgtcaccagaaggttgaagcaggtgcacaacgggatcccggctcggaccgaacgagtactcagttcggatcagatctccgcgttcggggtgggacagggtcgcattacctgagcaacgtttgtcgcgcgtggagacgtaagcctcggcgccgtctgggttgtagacaaagatctcagtctggcgggatggcagtgggagacggaaagcgcgaatgccttgggcattaatggttagaatgcgcgatgggtagaaagaggatggactctcgataagtgttcttgtcgtgctgttagacctgacagacaaggccgaggagtgaatctccatttccttctgaggattgagcatggctgtagtgttcattgtccacgtctggatgaccaccgtgtctccatgtatggccgtgtatatatgttcttcccccgatacgacactttcctatttgggctttgggcgacccatggttttcccaaacttaactccatttcttggcgctcgtgctccatgacgtcggagatcaccacttccttccttctctcattcgctacttctctcgctgaccatgtctggacttgctgagcctcactcgtatagcctcttttgtagttcctacgagtcccaaggcgaaagatacgatctcatgactttggctcgaacgagaaccttctattctggtggatgggcagcgatggtaatgtctgtcggctcccaatacgaactgccgtcacccggtagatggtctgagccgacttacttcgcaattgcgatcagcaagtccgccaagctcctttctacctttctacaacttcagaagagaacagtgaatttgatctccgatctcttgacgcccccttcctaatggggtatttcggacgaggatccactcccaacagtcctagcactcgattggtgtccacacattacgcctattattggtttccgcttgtcagtcgctaaccggcggtctcttccatccaactgggcttgtggtttagtggtataatactcccttagcatgggagtggtccggggttcgattccccgcgagtccatatttttgcttttgctatgttcattttgttcagctcatgaccattcggctattttggcatatctatatacatctttcatctttctattatttttatcttccggctggcaacaatgccgctgtatctacattccaatcacactcgggcccaaacctcttgagccgtcagcagtgtactcaaaaccatggtcgatccaaccaccacgtccccggtgggcatccagcccaaaagctccaacgggatgagcaaatcacagccatctaccacgatctgcttgacccgggcagaggtaacagttgattttaccggggtcttctcggaagcgatcttccggttctttctcttgccattcttcttagaaggctgctccgcgggactgacaagcagtgcccaaatggcttctgcaacagagaaagagagcgcatataaccaaaacgtattggcttggttcatgacaggatcattccaggtcactgcgtagacgcccattgcatgaagctagccttcgtcagtcctattcacggaggaagaaggaacagcagtaaataacataccgtggtcaggtcttccaggacaaagtaaaggccaaagcaagtgcatttggctagttcaagcagtccagccacagaaccgaagccatccttgcccagcaacgccaacatccgctggaaggagtcaatgaacccaaagaagcggaaatatctccgcgctacgcaacaaacccagtatcagtatatataacagtatatatctatcaatccaatatagaattcaacttacttagtgccaattgcagcttgaccgtggtcaattgcacggccaggacattgctcacggtgagtgctgcgaccacctgcgacacgcattggatcagacgaagggtcttttcaagaccagcgcccgatttgacaaagcgagaaaagtgttggatcatcgttgtcgcactgccacggactctggggacagtatactcttgtgggataggggtggaaattatgtgtcaaggcttggaagtgggctaatttcacttgcactagtaaagttgcttattcagcctttgcatgttcgaagattagtatgggttaactttacgtgtagtcggctattgattgttgtatcgaatagttcatatgggtattctgagcatgatcgaagttagctggtggttgtggttgcatgctggagatatatatagagcgacaagtccagcactacaaaaaatttacaaaaaatttacttgaaattgaaacaattgacaagcaaataagacaatgctcgcaaaatagtacgttgatatcagtcctcagccattcactcgagcaggttcatcaaaccacccactcgacaatagttccaagtctgctctaccgtcctttgccgcccgagatatcctgacccagacgatatccaccaaccttctcccactccactttctgtcgtgtaatgggaagctgcctccggagacccttgaatacgccctcggatgtctgaacaaacgcccgattcagcgcttcctggtaatcgcgctcggccgcagcaatccgtgaaacaatcgactcggcggacacggaagggatgggaatgctgataggcttagtagtattgagggccacattgccatcttcgtagtagtgcacgtcaacgtggatgttgccagtcagggtagaggacgaggaggagacggggagttggtaaattgcgcggaaacgaccattcctattgtcctagaacagacaatcctccccagaaggggaagcgtccataacgattagcttcccaagatattaattgtagagatgtaaccacccaccagaagttgttgggggagtatcggttggcgaccaagacgatggcgacggcagagtcattctcaatagggtagacaccatacgagcagttggggtagtgttcgcgggcatgaacaccgaacgacttgagtagcgatttgctaaacacggtaagcggagtaccaccaagacttcagccgggatcattccttacatcaagtcggcgtgctctgactccaatgcgtatgattgtgctgccgaggctgtctattgccatggtgcaaacccgtaagccttcaatgtatcagcccagttggtcaggcgaaacctacctgtgtggtgtggtcgatctcaaacgaggtttggctctcagggtcgaagtagcggttgtcttcgagctcgttaaattcactaacaatgaccttcccagcaaacttattagctccaccgcagacatagttgactcccaagcgacacccacctcctgacttgatcctggcaatttcaccgttgcgagctgcgcctcgttgtaccgtttgaatgcgggtagaagagaaggaatgatatcctcgccctcggaagttaaggcttgcacatctaatcaagtagtagggattagcaccgtccatgtagatgccgggattgcggggatcgggataggcagcgtagggctaagagggcgatttaccggcgacaacatctgcgagctgaagaaaacatgtcagtgatcattcccaagcttcaggcagacgttgaccaggggagtgggggatcctggatcattgttgtgcatacctctcctggcggggcaccctcgatgaaggaggatgccaattcaacagtggaagccatggcgtaggaaaatacgatcggagtatttgatgttgagcagagcaagaggttcaagagcaatccaagtcctcgagtaattctagagctgggaaatggtgattgtctagagtctctgcggagagaaagacagctgtcggaggcggagagcgataagcacgtggcctactatacatccaagactatgtgcgtatggacatcaacattctgtaacgtgaagtgattcgtaaaataatgtgccaggtatctgaaaactcgctggaataacgaatgtgtatcttgcttcaaaatatccatatccaaataacaccatgctcttaaaacctttccagaaaaaaaaacaaaattctcgagcgctaacgaataatatcaaattccgcatcgctgtaataagagctgttttcaatcaatgctcatattcataaagccatcgctggcttcggtcatcccttgcaggccgacgcgtttcgcacctccagcatgagcaatcggtcgattgcccacatcagaactgagtctttcagagaacggtggcccgaggcccggctttggcggcggaccccagatgtttgggcccgtgtcactgatattatgggagtgggtcatcaccggactactctgagcactcacgctgggtgaaacagcccggcgcttgaaaagattaggatcgaagtcatcgtcacgacgccgcttgcgacatatctctccaatacttggcatacccggagcatggggcgtggaagagcgggaacgctgcttgaaagattccgcggtgacagagcccatggtcgtagacggagtcatatccataaacatatcttcatctgccacagacgagggacctccctgacgaaccgggggtggggttcggtatcgtccatcaaacgagttccaaaactcgaggccacccgagttgcgacaggcttgcttgccaaaagtatccgtagatcctgtgtccattcccactctgaccgccggatcttctgttgccgtcgaatccaatgaggtcgagggccgcaatgatgggaattcgccgagtgcaggggtgggttcaggttcggtgtcgcggacttgccggaccacttctgcttctcgtttcatatcgctatcaactggagcaccctcctccatcagagcagcacgaatgcgcgcaaaggtcttggttttgggctgttactgtagttagcttctagaccactgaattaaaggcacccacttacaagtaagctcccacgtcgggtcaccgcacgacggattacccccagtggacctccaccttccgggcgtggagtgggaactgggcttccgcttcgcgtcgtgcgactctcactatcgtcgctcatatcggacaaacgtaggtcgcgtgtgccaaagctgagactctctctgcgtgaatgcgcagtctgccgtggagcaaaataaccactagagtgctcgacactcttcatgatgggcggagagtgaggggtaggactaggtttcgtactgtttccactcgcactgctagagctgtggcgactacggcctttgcgaaagcgcgcgcgttggaaactcatcaagctggcggcagcttgtgaataccctcccatccagtcgttgccagggctctgcatattgctggcaaacggactcggcgcacttatgcgagtcgcctgcggcgtattgatcataacatcgtcgcgatcagccatggactcatcctcttcctcgctactacttgtgtccgactctaccatattcacactcgacatggagcttgagattgttgcacggtccgccggacctgatgttgaaaaaggcggaccggatgtcgctccaagcgatccgcgtcgctggggtattgccatgccccgccctccaacggtgggagatgaatctggggacgactcggctagggtggaatggtggagattcgtacatgcgcgtgagaagtcgaggcctcgagatcgtcgagggagaacagatcccggagatccgtagatatgtgatgggtcaagtttaggagagagaggggcgcagttcgtaagtgatgacacggcgggtttggaaggcaagtttagcgagaggtttgaataagatgcatttgatcttcgaggtgttgcggggagaacgggtatcgcattgtcgtctttgcttgatgcccgactgagatcaccagtggatggttgagtggaggatgtaggtctggaagcatcggataatgaacgcgacttgggagaacgcgacggttcaagttggtgttctagatcagtttcatggggttgagataattgttgactgagcttgctttcaaacccgtgggctgatgtactgcgccctggcgctggaggtcgcacctgcgccatattcaagtcactttggtctgatatggcgataaagagcaagggtgcacgttgaagggcatcatttgtcggcaccgaggcagggaaatccggtcaattccacaagtaatgcccggagagcacatgcgctgtggttaatgacagaatatccacagtattcggatcgaggcgaggtctacattgcattgcaagtcgctggctctgagcggttaacgagatcagatgacgtgcgctaacccgatccggccaagtcgcttctgttacggagtagtgacctacattatacaatcgtatacttcctatgtgctacacaactgaacagagaaatatgaaatcgatagttcaatgctttcgaatgaacgaacagacattccacatgctcattctttctcatgccctcacgccagactcatggcattgctgattggcaccacatgccattcccaatcattgcattgattttgcagaacgctccccttgatcaaatccgaatcgcgtgtctgccatagcttggtgatcactgcccgtgttctagcaatgttcgagatcgttgaatcggccattgttgccagggaacgtagcacaatcgctcgtcccgactttgattccatttccgattccgggaagagctcatcgtcagatggatcaagctccacggctgccacaaagactggccatgtcacatttactagcgatttacggccaaggaggtccgatatgagtcgcagaatctggcgcacataagtcttcaccaaaggtgtggtgggaccagccccgtacagagagcaatgtaagtaaagcattgcagccagccgcttagcatctgcaaccagtccaagaatttcgtcagccttccccatctcttggactaagttctctagttggcgttcaagggatgctgcacgtagtgagaacgacgccttgtccgcatcagacgtatgttttctccttgttcgactcatatctgtgattttggcgaggattgacaccaattcaggactgcatcccatccaaagatcgatgttgtgttcgtccggtttccagtagtcggtaccaaacaagacctctttggcacaggcggttcggcccatgacatcctggaaggcaaaaaattgctctgcaaagctcgtcacaggatccgatggggctgttgactgcaataatgtcatttgctgttttcttcgcagttggattaagtcgttggcgcctttgagatggatgatccattgttgatcacacttgtcgactatctcgtaaagacatagcatgatcatgataaccagtacttcggggtccatggagcatgtcaagcttccctctgacgagagacgttgacgaaggtccctcagagtctctgatttataacgcaggccgattgcactatagcttggattgagccttgaccagtggcatgcgcccaatgcttggatggccttgaaaagcgtaggagaagccgataaacacaatggcagaatcacagagacaaacggcgaagataatgtggagctggcggttgtgcgagggcacacttgttgaagatagtaatcaaacagctctccgtgcccagatttggatagctctggaaatagcgcaagagacggagggaggctggtgttgaaattcatgctaaccccgctgagatgtgagaagttttgtaaccaggaccatatttggtggtttctggaagatggtgagtttgagcattgggtaactgaaatcaatgcattccactcgtcgaagtcaacgttcacttcgtctgggtgtgcaaaagttgacacaccgctgtttatgaagccccaagggctaatggttggcactgggcaccactcgtgcgtttccgaaagcgagccgtatgtaggttgatttgcgccggttttgttccaaacacctgcacgcccaaaagccactccccgactgatgaattccggttcccatttcaaaactaaattcttcgtacatggaaatcctttctcctggcagcgtgtgcaaaggggctttttggtgtcacatcggacacgactcgcccgacactctttgcaaccatcgcgagatcgggtcttcaccggacctgtgcggtctgcagcttttcttcgtggcatacgagttccgtatatataaacttcacatggtatgaaccagcctgggccaaaaatagtatgtgaggtgggtagttggagttggtaaagaaaattgggggtggcggataagcgttggccgccccgccgaatctccaactgattttcgactgtcactcctatatccgtatactatgatgatgatgtgtataggttacatggaaatagtttgaacattatccctaagcgtgattctttttccactctgccgcacactcgccaaatgtcacaaattcaacctcccgctgtttgagccacgaaatcattcgatcaatcatcccaaccacatgagccattccactagtatctgggtgcagcaccaaaggaaaaacaaagccttgctcggaatcttcctcgattgatttttcgagagcctcactgtagaggaattcaaaccgcgacttccaattttgctcaatggtgatcggactaacgaacccgtgcgagttttcggccgctggaagaaactgcattggagtcatgtcctccatataccaattgcacggaacttcaaccaaactccgcggagttctggctgcaggagcggggaggggcttcatccaagtagaagcagacttggaaggcgagaagtcaatggccttgggctctgacattcgagggacaaagtacaacgccgaatcatgatgcgtgagggatgaatctgtctgaattcagtttcctgatagtcacatataatatgagcaaagtcgtataccgtataaaaatccaaactcttctagaacttgaatggtgtgtgttcgcaactgatataatggtgctctccatcctcgaggttgctttccagtcaagtcggttgccagctgcacacatttggcgatgacctctctctcctgtgactcagtcatttgactggagccctcgtgcgcatatccatggcaaccgatttcagcgcccgattgaacaattgctttggtctctgctgggaatgattccattgaatgaccggggacaaaccaagtcaccgaggaactaattccatgtttcttaaagagacgcaataagcgtggcactccgacttgagctgcgaaaaagccactgctataatcggccagattggttgtagccgaagcaccagtccctaggaagcccgagacggcatcgaaatccacggagagtagaatttggacttttggtttcctggaagtcattggaagtgaatttgtaattttctaagtagtgcaaaggtccaggtccaggctaaggggttatcaaatgacaagcagacgaagttcaagccccgaaccccagaaggaaagacgacccgacacgtggatccaccccgccatagagtgcaacccttgagaactccaacctttgccttatcaattcactttcggagaacaacatgctgttaacgccgattcaacaagtctactcttgttatcctcttgacttgacacagcaacatctaaactcgggtttcccgtaaagaagttgaccggtttgagaccaaccgtcatctttttagagggcatcactggccaatcctcgattctcggattgtgcgtggatccaaatgtgtgccaaataacaatgtcttcatttcgcactgttgacttggagtccgggtcctttctccgctgagaaatggctgagtcgattccttcgccgccaagggattgcatagtatgttttccggccgggaaaagctcgtcatccttataacgggtgatccagattgcatggtttccatattcagatcgctttgcatggaaagactctggatgggccagtagcagttggctatagcatggaacaattttgaatccaatcggcgtaccggtgacaggattgactttcgcctcattgatgatcttgaacgtgcgattcttgttaaaatcaagatctagccctccctcctctgtcacaatccttgaatgtgttgtgtacccgaccccgaacggatttcggacagatgggtcgttaaagggcaaagggttggactcttcaacctgcaacgagtttgcaactccatcaatcgcaggatcgatgcggagagagaacaagtgttggtgatatggtgcaaggacacccggagcaacaatggtgccatatccaacttcgtcaccgatgttgatgggactggtagacaagatcccagtggcccggacttcataatgaatcgaagcatcttggccaaagtggaaagcaaagatatactcataattgctgaccgtgatgatggtctgcagcactaggatacgtgatctgaccaccgcggcatttcccgtacggaagtttgtgtgcttccataaaatcccatcgtcttgctcatgacagcagatgacattgggcaatttcaagggttcccccgaggaagtgttgtgccatccgtcaaaatacttgatcagtcccagacaatcacatccaagcgataagttgtttgcgttgatcccagccccgtcgttcccaaggtcaaatgcagctttgcgtggatacggagcacgaggatccccatatggcacaaacatctctgccaatgacagccggtagaagagactccgaccgtcatagcggatgtcatgcaacgtgagaccctcacggtaattgaagcccacgcgcatagtccatttctcccaggtcaataggtttccgtgtgacttgaaggaaaccccttctggctggacaacctggtagggcttggtggttgtgcgcggtggtggtcgcagactgggatggtattcactcatatcagtgggatggatcttgcaggggtcgtacagccgtgcttcttcacgaacactctcgctcgcagacgaaggtaaatggtagaccttggtcaccctgagctgctcagagacctccgcacacaagtcaagtggatatgcataatagttggcgtcgggattgtccactagtcgcatataaaaccaacactattcatctatgttagctgggattgagatattgcgaatcttatcagacatgtactgaccatgctaatccgttccgacatgtcgttcatgccatcagtggcataagcccacggttcgacaacgaccgaagcccctcgaggtaacctcaactttccaatttcattttgtaccctctcgtctgccatacaagcattctcaacatctttcatataagccgagtcaatgaaggagtgttttcccacaagggtctcttgttgaatgacaacactccggtccagatcaactagaagctcggtgagttcatttggccccgagtcgccacgaacgaccacttggatatgagcgatacgaccaggtcgggagacttgaggctggttaagatgttctctctctaagaatactatcatctcctgcttcggtggctctttcaaggtgatgaagcgaaagttgaagcttttttcatgaagtagctcttggacaacttttgcggcctacaatatggttgatacgacattcaacttttgtttaattaaaacgacttgacttaccttggtaatttcctggggcacaagaggatcaaaagggtgcgtatcagacataatggaagtatctaagaggtgaacgaggataataaagacagcgtgataaacctgggcttttataagttgaactgcaagatatatcagccaaccagtcacagacaagaccagataacgcaatgcatgatattcgctaagatataagaataaccggaaagatcggctggtcaatcgctaaggtaaagaatagccggaatatcttcacctccaaaggttagaacggaaatagacctctatgtatcataggaaggtaagcactagagcccatagtatattataatcacacgaatcaaaactcacttgaagccccaaatatatcagtgagatgtttggggattttcctgttcggcttatctcctcttttccccgcctcaactcttttcttcctctcgccaacctgtatattcaaaacatggcttcaactcgcaccattctggtcttccagcatgatgccagtctccatattcttgaaacaaccgtgacggccattttccctttcaaggacctcgaagaatccgatcgtctactcttcaaagacgccagcgaggaacaccatgtcattgtcaccgagaagactattttccacccccaaggcggcggtcagccctccgacacgggcgtattaaaaggcccatctggcactttcacagtcacggctgttcgcacggatgccaagggacaggtgcttcacctcggtctcttcgaggactcgtcatccgctttcaacaaaggcgagaccgttgagcaggcaattgatgtggaaaaacgtcaactatattcccgtttgcatactgcaggccacgtcctaggcgcatcagtccgacatcttttggagaaagagattgagaactttgatgaactgaaagcctcacatttccccgactctgcagcatgcgagtttcaaggctcaattgaagggaaatggaaggaccctatccagaacaagctggatgaatatatcgccgccaagatgcctgtccaaatcgaatggtgggatgaagaggatttccggtcgcgtggactggagcgattgattcctgaccgcagcttggtgcctgcaggtgaaaagtctcgtgtggttaacatcgtcggtgctgaagtgtacccttgcggaggcacgcatgtcgatacgacagatttgtgtggacctgtgacggtcaagaagatttcgagaaagcaagggaactcacgagttagctatgtggtgaaatgatgttgtttcactggttcggcttttgggaataccatatagacaaggagtgagcgacccaatagaccaaaataatagatgttttgactagacctcatctcgaatcactttccacctcggcgatatgttacggaaaagttctacattacatgtgagagcaatgggaggcctatgttgttacctttcagatgtctaaataagggcccaacagcaaatgtccctgatggtgcgagtgaatactccagggtagaaaaatcatattatgcctaaaagtcagcgctagattcatcgggatggctctatctcctggagctgatagccttcctccgagggatcagcgcgtgaaataaagggccgcgcaagagcctcctcatcatcgaatttagcaaagccatcgggtccagcaatatcagctttgtcataaggaacgtcacacatgaccgaccgcagcggtggatagtagcgacggtatgaaaaccaggctatcagcatgcccaagagtcctccacacgtcacatcatatacatcatgccgataatcggccagacgggacagggcgaccatcaaagcacacaacaaggggaaaaacccaagtaaacagcgtccaagatccgttcgaggacggaaaacatgcatttgaccacacaagaagctataaagtgacgattgttagatggagtgtcccagcgctgcgcatcagaatcacttacagatataaatagcccagcccgccaaaagagaagctgctatgcccactagggaagctcctccatccctcttgtagaatgtgctggttcgattctgtgcagacagtccatgcgaccagcgcattgttcgatgtacctcgggagggtttgcagcgcgataacaagtccggacgtggtctccccgctgcattttttattatgtccgtcaggaacgaggtcaacatcaaagccacgaatagtccgagtactgtcacttgcgtcttatgcacaccggcgcgaaatgttgcggaccaggcgagaatcaccaaaaaaggaatcagaccagcgaagatgaccgaccacacttttactccggttagaaacaagtgaagcagactgcatcattggcaattgacttacaaacaggaactcgttcgtggacagcgaacgggtactgaatggctttgttatccagcgaaaacatgcgatggaacgggttcacgaataattgaatctattcatgtattaaaaatgtgcagatccatgatttagatcgtttgcgacttaccagtacccatcctgctactagaaaccccaatgcgatatagtcggcggcataggtgcgttgcgcaaagcgagctgcagcaccagcgagtccaacacgttgtagaatcggggtcgacccgttccccgaaccattgtgaggcatcctgcacaactgccgaggacgccagagagatcttcagatcttgactgggcgcatgtcgagattggaaaaaggtcaagttgacattcgacacattgcggaagcacagaccacgtcaccgctccgtcttccaaacaactcggagaaacttcaactctgctcacttggctcaatttctttctcctttctcacatctcctaccctcgtgctagtcggtatggccgatgagagccaacaacgagctgtgaccacggcatttgcgcccccgccgcccttatggaaacacttcacgcgtgagaatatcgacaagctggaacagatcaaagctgaagcttccaagggcgaggatggacggttgaacaagcacaagcagtggtccgcagctgaattgcgcgctctggagctcccctcagagctccggtacctagtgccgcccgacatccccgaaggacaatacagcgtctttggcgagttgcaaaccgttcgttcccctacatctgagctctgcgccggacaatactgactctgaaatagctgtctacaacattgccgtcattacaagagcaaggcatcgaacaactctacccagaaccccccgcagccggtaccgaccagaactcgcagccatcaccccctctcaatcacgcatactaccttctcaagatcagcaagtccctgctccttaatttcctagagttcaccggtatcctatcggtttcgccggaacaattcgaatccaaggtcgaagacctgcgcaacttattcatcaatgcacaccaccttctcaacctctaccgtccacaccaagcgcgcgaatcactcatcatgatgatggaagagcagctcaaccacagccgagaggaaatgaagcaaatggacaaggtcaaagcggaggttgagagtgtactagagcagctgcaagcggagggcagccgcatggctactactgggtcaggagacgataccgaccaggccaaagcgctgaaagaaaaggccgatgagcactctcggctgatctgggctctactcgacaaagaaaactgaatccagcaacgggctggtttctctgaatctgaacagtattgccttctccgagtcgaacgactgaaccattcctgcgttacgtgtttaaatgtgacattgtttcgaaggtcagcttcgttgaaaagcctaccacggaggaatctcgaatcgagtattcatcagcatccaacaaatcgtccctcgggttctctatccaggtctcatgggcacgcaatgctcactgggctgtcaaatatgatgtgtcgatggaaggatcgcgcgcttcgtatcatccaaggcagatattgaaccacgccaatatcttggggacattccgatgttctagcaacctgctatcaagggcgcctcgttttagaatactgaactatctaagaccggcactctcgaagtcccattaaaccactcgagaggccaacaacatgccggttttcgtgaatgtctgccggagcttcttgcttacaactacaggcagtatcatatatcgcatatcattatattgtacactggtctgaccctttctaccgaatgcaatgcaaatgactgctcttccttctacattattattttgtcaattctaagtaccgtagccaataaactcctcacgctaaagtagccaatgagtgaaataacaataacaaaatgcaaatcaatgagaagcggcgcgttgctccgcccaggccttgtcaatggcacattcggccagtcgcttcaactccacaatgaaatcggcgaccaatttgaaatggccaagttcagttgcaggtagtttccgcgagaaaatacgctcaatcatgaccgtggcgacattcaatcggcccaggtcttcacgcgaatgtggatccaatgggttctgaagaatactgcagaagatggtgagcaatgcggacatggggtagaagatcagagtcctaggaggataagcttgggttccagtacatagcatgacgaaaatcacataccagaaaaccccatcgactaccacatgttctgccgcctcgaggtaacatagacttgatcgactggcttctaccgaaagcgccatacttgaactcaccccatccatcataccgctttgtccttgcatccacgctttacatcttccactcgcttgatggatgatggtcatgcataggtgatagttcagacgcagcatgacggtgtgcatacgcatgttcggatccgaggtctcggaagaaaatgacatggttggacgccatctaggagggactgatagccgccattcttctagcgcgtcatcgagttctcggattgacttgagcagctcggcgtctgatttttggagacagctgactgaatatagctctcgatgggcccgggctttgatgatgctcaggcgcaagtcgaatggaaatactggaccgtaccatgggacttcttcgttttccacgtccaagaatgctcgatcgagatatcccggaggtagtgtcagatcacaattttcgtcagtgatggtaggcggctgacccgtgcgcagtgcaagatccttatcaatcgtgtagcaaatccagaagatattccgtagttgtgaatgctcttgctggctgcgctcatccgtcgagatggcctgaccgtcaagccggttgccacccagcatgaaaatgagtcgcgcagcaagcgccgcataatagttggtggtccgcatatttcccgaagataattcgaagagagtctatgttcatcggttagttatcgaaattatacactagagtagctcatttaccaatatggtaacagcctgcgctgcgtccagactggcagactcctgtaatacttgcggcataaagaactttgccttggtagcaagtagatcatgatcgattgcagccgtcgcagtagtcgtgttgacaatgtgcttgacgtcagggagacgagaaacaaaggtaagaaatgcaatgacacaaactctggcgctagcctggccatatctgaaggtagacagcgaatgactgtaagctgttcggatggtttcttcaaaaagctccgggtctataacaggaaagatgcgccgcatcacgttggagctcttatatgcctgaaagtacacctgcattgttccccagtcgggaagttcatagggattggaagtgttcatgttcatgttcatcaaaaccgagttcaaggtctgtccgcgctccttatcccaaggcgctcgggctggactaagtttatcaattgaaacgtgctgtccggtgcgagcctcgatccattcctgtccttcgggaaagaggaacggcgtgccagtgagtaaactgatgacacccaactctttgcccgcaaagtgaactcgcactgacgatgagtctggaagctgagtgttacttggggagctgctggccgtcgtattgacttcgaaagatcgaggcgaatctccaggcacttttgccaattagtttcggggtacttcttaggcctgcatattgaagaggcactaaccagatatttgatcacccagtagattctctgcaagaagctgctcgatgcgactaattcgctccgatagtcgtgaaactttggggcgtcttatcttcgacgtcagacacatagaagaacaagctcgagatacagactcaccccccctcgtcgtcccttttccttttcctctgtactactctgtcgaatgtgcagggaatattatggtggctgcaccaattacactgcggaattgcagcatcacatttgatctaggaccagtttagacgggatcgagagttgacgatgaacgatctacctttcttttgtaacaggaatcacaggcacgagcagtgcgtgtccgtggctgatccgaggcattagatccatgatccattgtatagttgagatgtcttcagcaaaaaataagctcaaaggatgtgtcggtggacatggctgggtccgaaagccgctgacaaaatagccgctgactcagccacgtcatgccgaggtccatgagacgaagtgatagagccattgatgtcaattagtttggatagtatttatatgtagaattccggcttggatcgctagccctactaggggcggttgatattcgaagacgagtgttcagttttgaaaccccgatcgggtgaaaagggtattcaaccagctgccgagaagctgtttttgattgtctctgatttagaagcttcaattcgtacggcagggtatgcttcgagaaagtcaagtttatcaatatggttgatcccatgccgcattttcgttgcaaccaaccgaccgtacgtccgtttggagaccgcaaaacagccgatatcgagtggttggctgctataatttaaagctatagaatgaagttataagacatcgcatttactatgtgttttgggtgggcggctcgcttggaaattacgtcgtccaaggacaaaaaaacagattccctgtatattttccttgtcttgccctctccacatgcgatcagaccatcgccaccggaatccccaaacaataaaacacgtccaagctcgagggagatgaatggcagctcacatcacagtgcatatgcagaaatcgcactcttcatcgccgcagtcacagccaaagcatggcttagagaccgatttgatgggctttgtaatggagctaccggagctgctggaaggaaggatgcagtcgaatgggattgaaatagaggtgacggccatggtggataaaggcttggatctattggagattgtcagtcaagtccgagcgagaaaacaaaaagccggtaggttagaaagcacagaacatcgtacctgcaaaaacaaacacgggtatagggctttaagcagtgggttgggagaaagggggaagatgaaaaagttaggcgacaggcagtcggttattaaatgttcccacttagacctcgttaactcccaagaacaagagatacgagcctaagagttgttaggccataacatcttttattatctgaatcaaaatggacccgccacacacgtcacgggaatatagggatattatgccaacataggattgagtctataagcgcacgagttagaataattcagcaaagtagtagagaaagaaagatactttgccctctaattagtatggcttcactctgtaataacaccgtcttcatcccattcagataaccgaggcagtggttcgctactagtctagtagcaagaagcatcatttacatgggaatctctcagtcacaggagtgggcgacgtagcttgaagttctctccactcgcacctcttcgtgaacacgaataccgtcattactgcttccatactgacccaccagaatctcttcatcgctccgactataacgaggtttgacatacttgccctctgagctctccgaatgcgatccatgaacgatggtgcgatataacgggcggacggtggggatgccaacgcagataagagtgacagccagttcaacggcggaccagattatgaggttaacagtgtcctctagaaaagggattggtggcattggatctagacgcgaggaggtggcttaccggtgtagttggagctggctaacccgcccaggtcaatagttcggataattccgcaaatgcaggctctagaaacgaggatgactatgtatccatgaagaatcggatgtgatacatacatgaagcccagactcaagctgatcgcgatagacatcttttccttgaatttcatgttaagattccaaatgaagatccacggaagaagagtaaaataaaagtccacggcagcacaccagcctagattttatcaatatcagtatagacatctcatacaaacagtcgaagagatatcgaacatacatccaagcataacggagaaaggggtgactgagacaacagtataccctgggacgcgatgatcccatatagatcgagacggaacacgctggaaccaaaagataagggcggtcatcatcgacacaatcgacaagctgatcatcgaggtccatattgaaatacgatgccatcgcttgataacaatacaaagcaggaaagttcccagcgagatcttcgcaatcgccattcctaatatggcaaatgtttttccaatcatttcgttatacacggccttcacagctgagtccttctccaaggtatctatcgattgtccgaatccatgcacaccagcaatcgtgagaaagacagtgtaaacgagtaggaatacctataattaggtcagcgttctatcataggtctagtcttgggtgctttgcgaatgggaaaatacaccttaggccaaattgaagatatggtcatccctcacgagtgctttcacaatatggactcggatgtagagcctgagcaggaccagaataaaagagagcaaagtcattgcccacagcacggaaatggcacgaacgcctttcccagccaacatcttccagattcagaaagccggttaaatcagaccaaatgctgcagaacaatagcgcccggggcttgctagattgagagatagagaaactaaacggcattgttgaacaaatagatccttgctctcaatatctcaataagttggaaatagtaaaaaaaggatctccgtgaactacaaggctaaaccatttgaagtcggtacacgcgcggattataatagaacagcgacagctccatgccgctcaatccgttcatttctgcacttgcagggtcgtaattcatataccagcccgttatgtgatagcctatattatttattaaagatcatcgggacgttcaggcttgaaaacggcccgcagcgtagtagcgctccttcgaggagtttgaaaagccaattaggtacttccaattggatattgtatacgaggtactccatatttcgtactttcgtccttttcatgcttttcgctattttgatgggtctatgtgtctttgcgccagcctattcgccaatcgtcggaggatggcccgttcgagcaagtcaattggagttgagtttatcctattggcattaacgagactactttgatgcacagctgagtctaggcccagcaatatggagtatggaggatcttgctatcttcgcttgacaactagccacgttttgattcgcatgcccttatacggagccacatgggatcgacattgtgagagggtatatgcgcatacgcgggctgtctatatattattgtatatcacggatgtttgagggttgaagagtgtatccagctgtcaactctccgtcacatatcattccacgatattaaaagatcgcctttttgcgatgcttgattacgggaatagagatgctgccaccatgcttggctatgcatttctcatagcccttccagtctggtatttaacgacatatctcctctccccgcttcgccgttatcccggtccctttctcgcaggtgagttgcagtatcattcttaagacccctttagcgttccgtattgtcctcttatacctcataggctggacaaacctatggcgtatgttacatgttcgccaaggaaataaccatgttgtcatccacgagctacacaaaaagtacggccccgtggtgcgcattggccctaacgtgctcgacctggatatccccgagttgatcaagacaatttacaatatcaaatcggagtatttaaaggtgtgtatcttactgcaggtggctacttgtcactagtattgatcgtagtctgtgacagaccgagttttatcatggcagtagtgcgaagaacaacggcaagatcatctacaatctcttcagcgagtgcgatcccaagttgcatgcacagcagaagcggcccgtctcgaaacattattccatgactgggattcttccactggagccccatattgatgatatgatttcctacttgtgtcaacgtctggaggagaaattcatcgatggatccaaccaaactggaacgtgcgacttgggcgaatggattgcatattgtaagttcaagcccatcgcatcaatcctttccaagacttataaatcatctagatacctgggatgtggttggcaatgccactttcagccaacccattggatacctggaaaaagggtatgactttgacaagaccctgagtatcgcgaatgtcgccatggactacttttccctggtgggacaaatgccaattctggatcatttgttagataaaaaccccatctaccgaattggcccgccgtccttcggaaccgtcgccaacatatcaatccagcacctcacggaccggcttcagaacaaggacaccgactaccatgaccccagcaagcccgattttctggacaaattcatcgaggccaaggagaaattcccagaggtggtggacgactcgcaaatcatctcttacctgatgaataacatggttgcaggagccgacacaacaggcgtcaccattaacgcagcattgtacttctccttgaaacatcctcacgtctgggagcgtctaagaaccgagattcccgcccacgaccataccgctggaaacaaggtggtctccttcaaattcgccaagcagttcccatacctagatgccgtggtacgggaagcaatgagatgtcatcccgcggtcgccatgctcctggagcgatacgtaccagagggtggacttgcccttcccgatggaagcctcgttcctgcagggtcgatcgttggcatgaatccctacattgtagggcgcaatccgtctatctggggtgaagatgccgaggagttccgtccggagagatggctccgcggtgagtcggagactgaagatgcactgcagaaacgtttgcaatcaatgaacaagctcgacctcacttttggcggcggaagccgtatttgtctagggaagcaccttggtctgctggaggtgtttaaggtgattgcgactctcgtgtcacggtacgatatcaagctggctcatccggagaaggattggacgacgcataatagcttttttgtgcgacaggagggtgtcgaggtgaagcttgctcgccggagttgaaacattgtgatctacaagacagggctacataggaaacacagggtacatatgcatgtagctaagacacttttacggaaaaaatccaaagttaaagattcaaagcatgtactcattcacactatatacagcagcaacttttgaggggtttcatcaatcatcgccgcagtgactggggtatcgtctagtcattcgggcttccaagccatccgtctatccattaaaataaatccttttttgttcatcaatccgtaacagagcagtcggtttacaactgctccacccagggagcaacaccgggctgcatctggttcagccacttgacaagctcgataagctcggcccgacgctcatcctccagttgatcctcgtcgctgagaaccgactggaagataggaaggaggctgggggtgagttcacggatggtgacatcctcccacttgtacatttggcagatcatgcggtacaggggctcgttctcctcgtaatcgttcttcaggggaagaatgttcacaagggcaggaagaacatccttggtggggacactatcgcggtaacgcaagatcatgcggctgacacagccggtagcattatcctggagacgcgagacgtccatctgaaggcaggcctcaagacgggcaaggatggtggggatctccttgatgatctcagcctcagcattggagtgctgaatcaagcggccaatggcgtaagcagcattggacttggtttgggagtcctcatcggcgaggcggtgaaggagcagcttcaagaagacagaggtgaagggggtcacggcagcacccatgccgttgatgcactcagcgaggacaccaacagcagtggcgcgctcaagagcctcagtgctaccagcgtagcggaggatggtcttctcgaacaccttccagagctcggcaaagctcgggcccatggcagcggccatgccagagacaacgtccaaggcagtgtcgactacaatccagtcgaactcggaagattcctcaccagcctcgagagtctcctcctcggggccgaactcgacctggcagatatgctgcttggtgatgatatcagtgaccatctggatcacgttgtgaagcatagtctcgttggcaatgagggcaggaccacagaagcgcaagttctcggccatgttgcggttgatatcggcgacagtggaactattaattatcggtcagcaatcaagtcattgaatcgacagttgataagtaatgaggcaatggtaggagtagatctcagactgtagacttcgccgtttacatcaagtacgcctttggcgcatcaaagtgagctgggttaagcggaaaaaatcatcatagaaatggttgggcaagggaagaaaaaaaaaaaaaaaaaaaagacgggtgacacataccggtcatcttcttcggtccacatcttgacagtggctgtcatgagaatctcaccgaacttctggacctccttggcaggctgaacctgaagggggagaccaggctgccacttgggcatctggccattctcttcggcgatagcaaagagcatagcgtatgagcgatgcagagtgctgatggtgctcttgcgaacaccctcgtaagggtgctcacacaagggcatcacatgctcaatggtcttctcaaagtaaggcaggaaggcgctgcgggtgtgggtgacgaggtcaccgatgacctcaacagcaatctccttctcgagggaaagaggtgtggtggcggtaatgtcatcccactcgtcctcgtcttcgagatcaatatcctcgatatcaccatcatcctcatcgtcagcacttgcgaccttgaccttgcggccattgaaggtaacctcctgtccaacaaggtccttggcagcactgccgagatcaacatcaaggtcgctctcgtcctgctcgatgcaatcgtacagacccttcacgacaccgtcaaggaagggggcgaagtgctcgccgtagaccttggccatggcaccccagaagatgtatgtactctccttgagacgggagtgaccgagatgcaaggcttcctcagtggcacgcatgaggggctcaacgtacggctggtagcgttcaggaccagcggcggcggccatctcacccatggagtcagtgacactggcacggagatcgagttcatcctcactgtccttgacagcagcaaactcctggaggagatgcatcgactcgtcaaagaatgagaggaaggagtcaccggcagaggaggcgagggagccaagagcaccggcagcaagggccttgatcttgaaatcggggtgcttgaagagattgtgcaggatagggacaagctcggcctggtaaggagaaacatccttctcgtccagaccatcaacaacagcatcaatagcactgataccggccttgataatatcgagtgtagggccttcctcctcgcctttgtactcttgcatggcgctggccaagttctggaagagcaacggcatgaggcgagcgtgctcggaactgaggtcttcaacgagatcctctgcaagacgagcgacagtgtgcaatgaagcctggcgcaccttagggtcctgatcagcaaggagctggaggaccatagggaagatctccttcatctgggtgctgatgaagtcgggggcaccctcaacacacatgccgagggccatgataccagcgcggcggtaatcaggatcggggctgttgaagtactgacccagcgcgttgagcaaggggacaacgacctggctaggaggcaggctctgggagagcatgtcaagtaggccgagagcagaacgggcaggggtgatatcatcatcaccaggagaggcatcgccaagctcggtaacaatttggagagcagtacgggtgagctcctcgccaatacgcataccctgaaccttgagcttgcggtactggatggtctgcatcaggaagctgatggcctgggtgcggacatcctcgtcaacctcagtgttggcagcgatctggttcatcaagatgaccaggtccttgaggtggacggtcagcaaagcagggtcacaaccaagcagattctggaagacttcgaaagactgcatgatgtgatcctcctcttgcttctcaatggagtccttgagaatagcgaccatggcagggaccaactcttggaaagccttgacgggagcctcatcctcctccgagtccagatgcatagcaagcttgctcaaagacatgagagtgttgatccgaacttcggcgctttcggggtcgcggatggtcttgttgaagaggttgaagaggtcctggaacttctcctcgaagccttcaccgagagtatccaagatggtgaagagaatgtaaatagccacagcgcgctcagcagcgttgccattgttaccagcctgcaggagcaggttgggcaggtcagcccactcgccgtcgttcaaatcgatcttcgcaatagcggagatgatctgagcgatggagtgctggacgagagatgaactctcgcccatggtagagcgaagcaactgttcacgaatctggggtttctggaccgcggggaccttcagccagtgcttggaaacgagtgaacgggactctacggaagagagctggcgcagattctggtcatcatgactagtgcagatctggataaggaagacaagggactcgggcttgttgtagaactccttttgcaagactccggtggcctccttaaggtttccctgggaggctacatgaaggggtcagcgagacgaacatgggcttcgacgttgcaagacgaactcacgatccaggataatctgcaattgctggaggaatcgctgttgatccatgatggaaagggcaatgtagaagattttcaaatggttcttctttcttcctggacgattccagttgccccaggtctctatgagagactcaggccgcaggaacaaagattgagcagtctgtctcagacaaacaactcaaagggggtatcacaaagcaatattgacaggaagcaaaaaaagaaagagagcggaagatgaagaaaaaaagagagtagtgaggggaggagggagaagaaaagagacgagaaaaaaaaaatttaggggagtgggttggttcctgattgggtttagcgcgggaacagttgtcaacaggcgggaatttgggcagagatttttagacgactccatttatatggggttagattggtgtgcatgttgttatattacgatcatggttacagtgagcattcatatcattcatgtcagttgatccttcttgtaaagagcgcaattgggacacgaccaatggtatatcagctatacctaagtaacggtaacctgcatgctgcagaagagtatagagattttccacatcaaagacagaaacatataaaaatcccttcgccctaaaactcctctttcgtccgtcttgtccgatggagagcaaaccgtgctacagcaacaataacaccagttagcaagtgcttggatgtattgacagccgtgcatccggtggtttccagaagacccacacactaacgaagccccaaacagccgaggcatcatttaatattcatcagactcatattcatcatggagtagcgatgagcggtagccacgtgaagcgagattggcctctaggccaccttcggaggcagggtcaaagtagcctaaatatgtcagtagagttctccttattcaatagcgatgggtcaatttgcacgtaccaccgccgccaaagtagctgagagccactggtaagaagatgagagcatgcgtagcagcaaaaatcaccagggctagccaaacccggaagtagtagatctcgaagatcttgcttcgagtaaacgccaggacgcaaaccccgagaagttttgtcacggtaataccactgaagacagtcccaccaacattgaccaaggccgcccatgctcgagcgtccttaccacggaattcggcgggcaccttatccatgatgggtcgagcggggaacatgaatgctcgggcaatatgagcacagaactcaacaccaatgccgacacaaatgaccaagttgacaagagataccgcattcaaggagacgccagcgatcgccatagtgccaatgatatcgaccactatcataaccactgtggttgtgatgacagcgcccgtggctatagaccccaatatcacagaggtcaagacgaagatgatggccacggccgacccaaggagggtaccagtaagtcgcacaatggaaacgtattgatcaaagaagatgtagaatttggaatatgggaagacgtcgatatcatgttcccgtgagatgtcatctgcaatccggcgagctgcaatatatgcctcgataaattcattctggctccgaagaggcgtgtggctagtacggaaatgactggcgttgatcgttttatacttgtcatcaatgaccaaagcattgctgtagggcgctttaccaccgagggggcaggatgcatcggtgggagcatcgatccatttttgggcgtaatggacaaattcagatccttccggcattcccgaaagagagatgttccaggcaggaacgcggtcctcaaaacaaagcttgccgttttctttgcaacagtcttgctgggggttcagccaatagaagaaatcatcaatccagctggcggcagagcctgcaagataagaaacattcggacgcttagactcttgctcaagaataaagggaagtgaatactcctcgcaagtggtgaaccgtccacagagctgttgttggtggcttcgttcggtaacattcacattccgagtcacaaaatagaccggaggccctgtgtcaaagtatgaatctaggtcgttgaaatacgaaatcagatacgagtcgctagggagcgcgatacgctgatctaacccaagaggaacctcggggatgaaggctagaccggcagtcaaaagacccaagaaaaatataacaacgccaactttcacccgacgatccaggaggaaaggcgcatagacccgacgaatgaagacctgcaaagtgctctctgcttcctggccgtcgtagttctccccagggaagccgaacgaatttgctttgcgtacagtaagacaagggatacagtccgcacggagactctgcacccgtctctggttcagagccaagacggagatgaacatggtgatttgcaggatggcgttaatgaagacagcaccagcggcgtatgcggcaaaattcttgacagcgggcataccaacaaagatgcccagggcaaaggctactgtctccgtcagagcagacaggaagatgctaggtccgattcgaccaaccgcacgggcaactcgctcgtcgatttcttcatcgggatggctgatattgactcgctcgaattcgtggacgatcaagaaaatgttgtctacaccgactgccaggaccaagaatggaattacttcagcaatgatcaaggtcaccttgacgcccgctgccgagaacagtccgaccgatgcagaaacagacatcaggacaatgatgatcccgacgatccccagtgtaaatttagactgaacaagagcattggacggattggtcagcagagacctccaggtaactgtgaccgagcccagggccattgagacgtagaagaacatgatcaggtaactgatgacaacaatcttcgcatctgtgttggtagacttgttcagttcctgttccaagctgacctcggaattaaaagatacgcgaaggcctcgctcggcagcctcttcttggactaccccgagaacggcctggaaagtgttctcccagtcaatggcttttgcttcttcttctgttccctggtcgtaattatttaccacccaggtcacaatgagtgcctgggcatccagaacattccctgtgtcttcatatccaccaagaatcatttcgggcttgaggggctgcgagaagtcggggagacagctagggtcgccaggcgactttgtgcagtggctaagtctgtccttccatgtatctgggtcaaggtttgagacggaaccgccgaaatacccagtgaaggattgcacgacacaagcttctccagtcggcttgaaacaaacgtcatcgaaattgagagcctggtccaacgagatcacgcgtcgcacacgagattcgacgtcaaaccaccaagtaagggtttcgtagtccaagagcggacgtgagtcattatctgggcggttattcaccaaaaatgcctgctcggctcggaagaatggaccaaagctctgatcgaagaaatccttctcctgggcggccgcagatgacggactcacccagagttgcaccggatccgtttcaacggtgaaatttagccaccctaggctcagcagcaccactccggtgacgctggagaatattgttattgctgggaaccgcgcacaagcaccaccgattcgatagaacatagctgacaacacagagttgagcttgtatactccatgtgatctttccatatatcctccacggtgcatgacttccccttcatcttcgtcatcgctgggcgtgggatcttgtagcaaccgcacccgctctggtttgcggaaacggcgttccttgtatgtgacatagctcgcgagagcaatgacaaataatagaaagacggaataaacgagaatgacggcaaacgatagacatggtagaagtcctacatgacatatcttgtggggggagatggcaggcaactccggacacacttccgggcagtcgacacaagaacatcggaatgatttgtcctcgtcattgcaggctttcggctttattgacaaagccttcattccttgcgggtcaggcccagtgggctctgtgtgatagttaatctggaacgggctcccgagaaacttcttatcacctaaaaacttcatgaaatggggagcgtctttcgcaccaccgccgatgaagtcaatggctttcccgcccgaggcaccgttctttacgttcttgcagctatcgtagaagccgttctggtactcctcggaccaaatattgtccaactcggtcacaagtcttttaccagatctgttttcttctgttttggtgacattgatgaaaagagattgatcgggggagcatgtaaaggtacagaatatgttgaagaagttgtctcggcaggcagggcaggacgcgataattccctctgctagtttgaggttactggaaagcgcatcgatctatgggttatcagcatgatagaattataaatatagtgatactatcgttgacgaaaacagaggccgggatctctcacctgttcatctcgacaacagaccggcccttcgctccatttgctgccacacagatttaccaacttttggcgtactgcgtcttctggttgttgcgccaggtcattatctggacagggtagttcacctccaaaaatggattgctttccacaatgacctcgaatagcacaacggcccttttcgtggattttagtttcgccctgtgcaccgacaagggtaggtgcaaaagagcccagcccaacgatcagggcgagagccctaggcaaccgcatcttgtgggaagaatgggtgtggtgcgagaaagaattctttctaccagtcttcaattaagatgcctgggacgggaacactttcaatactggaggttggccatgcactgttcggttcgtgtggggaatgttgcaggccgagctcaggagctggcgcaaggaggagggaatctgaattggaaggacaaccggacgatggagctcaatatcaaaatcggattaaaatcaataatcaagctcgatggctatgatagtaagatagagtgagtaagaggagaataaagcaagcttttagaagttgagtgacgtgaaggcggagacccgcggtacattcgtcccccgcacggtcacgcaacgaacccaagtaccttgtccaggcgctaaccgtcaggcacgatgatgtggctaatatcgtggctcgaatcagattggccgaactgacctctctgttcttggcatctagaacctacgggcaaaatatatttctatgtgattgtaaatataaatatgttctttgtccccgctcaaagagaacgtatgttgtatatacggggatttgagtctacgttataagatatgttattgtaaagacgctcatgatttcattcaataaaaaacagaaatgaccgactccgagccgaaaccgcattctatgaacaggaactccgagtctcaaacaggagagacaaatgtgattgcgtctgcatcgccggtgattcagttagcaatgagaacgaatatgggaagaacccagagagatgttaaaagatatcacatgtgaaaagaaattttgcaagccatttgcccaaggggtatcatcacaatgcaggccaggcaacataaacatgcaacctaatagccgtcatcatcgacctgttggtaaacgtggcgggttcgggtggggtccttgcgcatggtttgtccagagcctgtgaatcccactaaaagatgagcccggttagcatcacagagtagagaaagaatcatttataaggatcccatacctcgtgcattgacaccttcacctgtgcggaacatgctctcctttttgccaaaggcacctttgcctttgcctttagttttggcagcgaaatccttccatttgttcttgccttcttcaagctctttgttcgctttgaccttgcggggaatcttagcggggcgagccattccatcaccggccttgttgggttcgttgcgagcctgggtagctaatgcggggttgatatctgccgcggcggagattacaccggggtgagagagagcggacgagggaggtgccgaactgcctggggttccatcagccttgcgctttcgcgagtcagtgccagagatgggtcggatatccttggctgtcaaattttccacagttgcatatgacttgaaggtgacaaggtacactgggttgtccgatgagccagtgatggagttgattttggccgggtagaagccgtgatcgccggagacccagcgcgcaagaacaatgtcgttcaccgagaaggatacgggagtagtaggtgcagccgtggactcctctgggtgttcagaaggcttctgggaaccattcgccttgaatcggccacccttgggagcaggtttggcgggcgcagctggcttgagttcagcaatctgggtttggagaacggtaatgtattcttcgagttcagtcttaaggctgttgagttcagcattatcagggtctacctccaagcccaatgcgacagtttcaatctaatggttttaagttagtggcgcgtggtgaactggggggatttgccgcaactaacctgagacgtgcattctgtcaggtctttctccaaggaagatacatcagccatgatgagattctgattgatgtgagatagacagtgctattaggaacttgatctgcttgatgtgtatcggtgaagagctgagtggattgcggagaaataatctatctttcttcctgggcccgatcacgtgcattgtacttccgcctttctctccgccctgatagacggttttacgccactgcataaagtacatgtggatctgtacctagtgttcaccttcgttactcgtatgtggtcaagactttaatttgggaagactgggaagactgagcagtacgcagcatatctaattcagtatggtatgatatgcaaacaggcgatgaccctatagtatcatagtatcgaaaacatcgataatccactttctgcagatcgatggggatatatgcatgttaaggtctattagagctatggagtactccgtccaatatgctttatactactttgtatattccctgatttaggggtatgggaaaagtggtaacgtcattgaatggcctgatactccagcatatcggaccggggattggaagacccgggccagacccggcgacataggtacggagtacggagtctaaaagctccatatattgcattgccaagtcaagatgtgagtcagaggagtcaattaactaactaactactagttaactagttagttcgggaacagtgtgtagtatgttgtaggttaattaaacactttagggcttagaagctactcgaagtggagaaaaaaaaagaaaactgatttcaaagcagatacgcctacagccaatcatatcagccacaccactcaccgcccatccctgatcgccctcccccctcttccagtcctccagtcatacaacctcgtccatcgtttctcttggattctgcaactttcacgttggaatcgttgcatatcagcctcgtgtttgctcaagccacacttataccgcaattcgactagcggggaatttgtcctcgcctcaagcccctctcgaaagccgctagaaactcttcttcctctttcccccccctccatatccaatatcgccccccatatttccccccccccccccccccccccctttccttcccnnnnnnnnnnnnnnnnnnnnnnnnnnnnnnnnnnnnnnnnnnnnnnnnnnnnnnnnnnnnnnnnnnnnnnnnnnnnnnnnnnnnnnnnnnnnnnnnnnnnnnnnnnnnnnnnnnnnnnnnnnnnnnnnnnnnnnnnnnnnnnnnnnnnnnnnnnnnnnnnnnnnnnnnnnnnnnnnnnnnnnnnnnnnnnnnnnnnnnnnnnnnnnnnnnnnnnnnnnncccccccaactctggaattttactctcggttcttacttgcgacggatcaagattcaacataatatcggattgccgagattgctcactcacaaatccgaataagttgtgaaacagccgtgaagctatactgcgaggattgaatcatcctccaaccctcgtcgtttcacggcatccatcaatatctgttacgggcgggaggcccggttggactctgtattgaaatccattcatttttcatcacccttgcttttcttgtctctcgtcagcccctctatccattggaagtagaccgtcacaatgggtgattacgaacgataccaacaaggtctttacctttcccccaaccaacaagacctcttactagccgctctatcttccaacaaccccagccaaaagcctcaaagtggctctcccccaatcaagtcctctcagagccccgacgaagatcccccaaacgctcttagcaccgacgatccccatgccaacaatttcggatttggggacgacgaaagcccgttcctggatttcatcccggaggtggacttcgatttccccggctcggctgacttgattggtgacctaccgggattggccgactatgatattggcgggaagcgaaagtctctcgacggcaagtcggacattgaaggggaagaaaccggaaagaaacgtagggaaagtgaggccaagaagcctggtaggaagccactgacttcagagcctactacggtatgccactcttgctgcacgcggaagttgctgggactagagtcgtgaactgacgtaattgagcagaagcgcaaggcccaaaaccgagccgcccagcgagccttccgcgaacgcaaggagaagcacttgaaggatctggaggagtcggtggagaagctgcaaaggacatccgaaatggcaaaccaggagaatggcttgctgcgtgcccaggtcgagcggttgcaggtcgagctgcgtgagtaccgaaagcgcctttcctggatggcctcgggatcaggaaacgccatctcggctatgagctcgaattctattccgggtgcccatgccaaaggggcctatggcctccaaaacaacgagtttctcttcgatttccccaagtttggcgatttgcctgggggtcatctcttcaacggaccggccaacaagaaagatcaatccaaatccaatgacaacgtccctcgggcacctggtgtcttgggtcgcgacagtctgaacagtccctcgtctcgatcgaattcgctttcacagtcgaacaaatccaagtccaccggaacttccaccaacgctacttctaccaaatcgccttactcgggcttcaagccttccgcaaatgataaatctactacttcggaaaattctccatcgtcttcctccgactcgcaccagagccagatgctgtcgtcaaacgggacgtccccagaaccaagcatgaactcttctccaaatgggcagtaccgtgagctagggccaggggactcttgtggcgggcatgtcaccaccgatggagagaaatccttctgtgaacaacttggtatggcttgtggcaacatcagaaatcccatcccagcggtccgggatagcaggtccaaatctcagagtgtttcaagcggccaaccaaccccgatcgatggtccagccgggggcgaaggctctcaggatcttggaattgattggctggcgcatcagaatggcgggcagttcgatccagtgctctttggcgattggcgagagccccaggatgctgtgctctctcaggatttcggctctttcttcaatgaagcattccccctgccggacttgggtagtccctcccacaatttgtccgaggtcgccactgacgcggccgcacccaagaagaacctcatttctcagattgataacaagctcgaggaagatgaggtcgttccaggcgaagaccagtcgcagatgctgtcatgcacgaagatctggtacgtctatcctcatataagtattcaacagtttatcttcttccagatgactgacttcattttttctctagggatcgtcttcaatctatggaaagattccgcaacggcgagatcgacgttgacaatctctgctccgagcttcgtaccaaggcacgatgttctgagggtggtgtagtcgtgaaccagaatgatgttgatgacattatgggacgagttaagtagcggcttgcttccaggaagctcaccgtcactgccgcccttaaaacaactcatactcgggcttaattcacgattcacggaccaacaccaactcattgatacttgcgctctcttgatttatacgcatacccatcgtcgattgtcatttatgggaggaatcctgcccggcgtcatgaatacaacacaggataaagaggaaaaactcataggagaggagaaataacatcctatttacgggatatctgattttgaaagcgaatttttttgtcgatgcccatagctggcaatctatcagtgccccttctcaaggggacaccacattcctttttttcccctctgctctctttgcaacagtaattgtcatttgatttattttatgcttgttctgattgacaacattgagctatgggagacaccgtctctggccatgagatttcagcaaaaatggaatggcacttcaaatgcctattgtacggaaagggaatatggcgaaattgatatactactttcttttgcagctgggacagaatagccctgctttgcgatgttcaatgtacttttctttttttgtacacaatctattgaatggatctcatctctactcgcaattgactcaattccactaacccagcttgattgagcatacggtaataggaagacttgtaggtgcgcaagaatgagtacgaagtagcaatctcgtagatctacaaactccagaagaaggaaagctgtaagggtatcgatgtggtccacggacgtaaaaaataaagtacaaagagaaaagaggtgaaagggtgcattctttttttttcttcttttcttttctgatgatgttttctccatccattcctccctctgcaaacaaaaaaagaaactgtctggagctcaccgaaggactctcacttcggagtccagatcaacgctgcaattagcgtccatgtcccgtgtccctgaccagacctgagaacaaagaacataaaagattgagcgctatcagagtcaaataagggaaaaagaagatttgcaaatgggacaagataaaaaaagacacaaaagaattagagtatcaggtgtgtaagatcgaggcaatgtcaagggccgggggaaaaatatgagacatagaaatttgtatgtcaccgatcaggcgtcgccggatgcgacaggcttgtcgcctgagggggtaggagagtcattagggccgctcttgaagccaccccggcctcctccacgaccaccacggcctcgctcgccagtgccacggccgccgcggccacggccaccgaatccaccacgacgactgccatcgctgtcactggcgctctggtacccacgcggggcggtagtgatgccaccccgggtgctggactgccaagttccggcattgccgacagcagcacgggtgctgcggtcctcgaagaacttgaagttgggcttacgtggctgaccatggggagtggaaccgggcttctttagctcaataggcaagtggtccagagccgccttggcctcttcgacgcccgagaatgtcacaacgtggttatacttgccgagcttttcgatcttggtgatcttcgatctgtcctcctcagagatgaggtcacggacggcctgttcgctttcggcgcttgttacgaaaagagcatttgcgggcttcttttcggcacgtggtgcaggtgattcactcagcttttcgtgcggggcaataccgttagtctcggcagctgcggtcttctcctccccggtgggctgagcagaggcggcaacaggtggctggggggtaatggacttgggaatcacgggaacaggggaggctctcggtcccttctggccctgaggaatgggtgcacgcgcaggaggggcctggccgaactggggagccacgacgggggtccgggctgcgcctgtcggggcgggtgaggcagtggtcgctgggtgaccagtagagacaggttgaggggcaccacctgcctggggtttgccagtgcggtgggcgaagttgaatccttgagcccgcatctctgtcgcgatgcgtccaccttcaacctccaatacgagatatccgaacgccgcatcggccaagttgaagttccacatattcttgaatgcactctcgtcgacttgtccagcggcattaccagcggcaacggggccaccgaatggattaccgccgttggcaatggaaggcatcttgtgaacaacatccagggcattctctagaagagtcttctgtccatcattagaggagatagctgcctcgacctcgatccggaccgtctcccagacatcgttaaatgacgccttagaggcagcaagcttgccacgataatgatccaaagacgggttcacggagaactcattgtacgaggaaccgtagcggaaatgaagaccagcggaaattgaaaaatcggccttgagggtgacggaaagctggttcagcatgccctcgcgggcaggagaagcgtgagtgacaaagatacgagtctcggaggggtcgtagacacgattggcggtgtcgatgagttcgcccatctgcaaaagtgtcgtccacatggtaccttggccgccggcaatagtcgtctttccttcaccattgtcgaaaagcttgtgcatcacgacagcacctcccagacccagcagacggagcttcacaccgccgatatcgagaaggcgcgagttggcctcgtcgataatgtgtagcttatctaccttgtattcacccgagcggaacttctccagcacgcgcacatcttcgcaggcaccccaaactgtgtaaacgggcacatcaagggtgatgcgcttgtccagtagcatagagagctcagagaggggcaattgctcgggcgggaagcgctgcttaatcgactgctgaggagacacctgtgcgatggaccgtttcacgttctcggggaggaggggggaatattgtgccacatgcttcaatgtcctgttcgtagattcgggttagctgatgctgtccagtagatttcggtgcctggcgaggcgaatgtgttgggcagcaaacacgcgccgaaaagcttcagaagaatactcacttgtctgcaattcgctcgagcgaggtgtcatcatagaaaccaaagtcaccggtgtgaatgatgtggtcggcgcgggcctgcttcgcaagctcgttaagcgacttcaagttgcctgttttacgcgtccaattaatattgtgtcactttgccaagaaagacattgccataatgtagttacctcgcacgtctgcaatgcacaagattcgtgtcggaccactctgaatcacacggccattgttggggagaagcggcgtggcaccggggacagggcccgcagccgcaccattcgaaatagggtagccttgagcaccgaagttggggcggggctataagttaaaaggagtgatgatattagccaagctctccaaaatctcaagatatgacattcatcgcgattagaagctggggtgcgcaaatgcgaggggaggtaaggttagggagccacctacagaagccatgggggtgttgaattagatcgatgtgaatggtaggatgtgaagtgtagaaaaggatgaaggtggtgtcgaggggaaaaagatgtcgaggattcactttctcatcgatgaagcagcaggcgtgacatgaagattaggtaagccgcccctgggtggacctctacaaacaacactctttatatgtccatgcatgggacctttgaactgattaagttgattcaatggattatattgactagtttgactgatttgactacattttattactcttgactgtttttagaatgtggtacttttgtgttttttccacattgggccgagatattatcatagagcatgatctcgtcctgagctcgtgaagtctaacattggtgagacagtccctcctcgcccgatcatccggggtgagtactctatgtaagctgtgagagatagactgaaggaccctaaatcctatcccaagatgtctcttgactatcaggtatcaggcatgtaggtcacgacaatccatgtgtatcaaagttctttgatatgattcccaaacaggtattgctgcctatctaccatctctcccactggctccaacactgctccacgtcgacatgataaagattgaatggatcgagggcctttcagtgctaacaacgcaaaatgtcccccaacagtcggacgggccctacacaaaataggaactcctggctcatttccgtgcgcagaggttgcaacataccgatcagagaaaggccaattgtgttttccattggtcatgaacgaccataagtcatcgacgaactcgtccctggtgctcgtttcaaaggtaccagccagccacatattccaatccgatttggcccagtcttggcgattatcgagaggaacaccatattcaccgcgaacagatgtgaaaaagttacttcccatttgataggcagagtcgggaaatgtattcaagcccagcaatacatcagggaagagattatatggggtcttccaagtacctggccagtcaggatattccaaaacaaaatgtgtctggtctttgtctgttcctaagccttgctggaagaagatatttgcatgctggtcaccagcgcgggagtaaaccccatctccactcatctccccaaacgccttgaggccaactgcggccttgattgccagatttgtctcgttcgcgagaggtccagctgcatcatttgacgacagctgattggcaatattgacactattttccagcaagtaatttgcatacttctggaaaacctccatgtaatgcgcagaccagtcggtatcgccagtggctcgaacatacgcagcagctaaaataagcagatttccgcattcctcgattggcatcggctctgctttctggtcatcgtgcccaatagcatggggataatgagtgccaaggtcatgaatcgtgtatggcaaatgccagcgaccagcagcaaggtacttcataatgggctccagcaatagtcggatgtagtccggatccatgacgtagtaaatcgggaaggcgggcatgataacgtcgattgtgttggtatttccattgctagaaagctccttgatgaaagccaacacctcaccggtgtcgagagagtcattgggaattaccaagtcgatgcctccgtatgcttgccgggtcgaaagagctaggatatctgcatacttgggacccgcagcggcagaagataaggcgaccagctcccgatccagtttcaatgactctagcaatgcgttgctatagtcatccaagaagaatgagagggcgctcgatgtggtggggtactctgcacgatagaaaccagtgtatgcttctccaagatagttgatggcggcttctctttcgtacccgaccacgaagttcacagaatgcccaccagtgacgttaccaagattgtgagccagtgcgacaacacttccctcagcccaggtatcgtcctcaccagatagtttaccatcctcaccaaatagccttcgtacatcctcgggacttcccgagagagcggttaactgactcaagctagatgatcgagaggcgagaattgctgagccccaaagagccatgtcgtctgcctcggcatacagcggtgcgtcttcgaccgtgagcgagtaaatggctaggccgtcttgctcttcgaagtcgcgctgtgagtggctttttccgccagtccacctggcatcgatatctgaatagatctggatctcatggccgcgcgattcagctacctgtactgttaaataacctattctcccagtcagttgaggatatccacaatctaccatattgcacatcacccactaaaaggaagcgactgccgaacatagtttgacggtgacacaggcgacaagaaatccagcttaaatgccacgggtccagccgtaagatcaaatatcgaatgcgtagcggtaaattcagcgcgacgcaccgtcgcagggcggatattgcttacgcccatgtctggaacgcccatcagactatatgcctggccattcacacggacaatcacagaccagccgagctcttggccagcccagaactgaggttcagcatagggcaactgctgtactcggtcgctgggcatccatgccgatagatacgggttgcggactgctagcgggtaggacggtgggaggacagggtgatgcgttacggaactcgattcctggcccgagtagagggagagcatcgatgcatagagggggcctaagcccagtgagcttagactaaatcgcatgttgaaattggtgcatgtgttggaggttgaagagtgtgaccaaacgagccgggcgcatatattatgaatggcaatatccacggcctagatggaagtatattgaagtcagaaactgaactaaagaattccttgtcgatcttcctgcgtcatattggagggggcccccacagtacttacgcgttcgcaactatctacaacttcccaattcgccgcccactttcatcgaaatgaatatgctttccagacacgagcgcatcctagaggtaatgatcaatcccaacggtcttcacaatattggttaacttcataaaaaccggcgtgttccctaagcaatatcttcctcgaaggtagggctggaccgacctatgaggaactcatcaagtaatgccaccgttgtggtattagctggtaaagtttcgccgagggttgtcatccactgtcaacttgccctgagtgcctatttcaccggtatcctccccagcaaccatcatgcgctagtaatactaggcaatcatgccattccggaacatgccaacaaacacaccgttgcaccaggctgtagactcgtcgtaggagccggcgggatcgaacttgccacaacgctagccgtggataacggcaggtcgtccgatgagatatcgctcatcttggccggtacgaatcggcaacgtctagacaagtcgtacaccaccttcagatagggcttcttcttagcagcctagaccactgctttgcactttaaaagatattcatcaacatttgtcgtaacttcaaacaagaagaaaatacaccactttgatgtcgctggacagcggcttctcccggagaacgtgcaagtcttgctcgagcttgattgtcccctccgcgtgcacgtagccgtcgcaatcaacagcctgtagatcgggatgcttgggcatcttattgtggatgatgtactgggtcatactgtagggcgccaagttcagtccaacaccaaggctgagaacacggtattgaccgcacaccatagtctagtggcttgtgaattgagtttgcttttcgcgaagtattgcaccgacttggcagggggtatcattcagcatcccctcgaccaaagggctgcggaatcaccattgcaatccatgcatgcaaggaccagttggaatatgaacgcggtcagctaaagattgcacagtggcaagaggttgacgagagtatagatcaggagtgaaaaacaaaagagtaattcaggtcgataaagaccgatgactcagtaaaacgacccgaacatgaaggtgtcatggaaagtccatggaaaattcttccaagtctcccaaacaggtatgccaaaggggtctggtcaaggggaagatctcaatctcagggggagcatcgtacgtagtcacaccccacccctttctccattttacattatttaagtcaccgttgcgcttcgttttctttgattaattccacatatactacaacgtgcagaacaagaagtacttgatatcctctgtgatatcctctgcaagaccccggcgtcccctacgtcccgcccccgcaaaaacaacctcgcgctagcggaagatcagcattgtctcggagaaattgcaagcgacgcgcgtgacaggccatttgtttcgcctccggtctcaccttcaaacatgaacacaatcctcgcgttcttccacgggctagtcccaagatgtttacggaaatccgatgtcacaaattccgacgtctcgaggaatcactactatatacccgtcatgcaaagctcaaagtcccccatgagcgcaaccaaagagcataagatcatatcaattccgatttcatgcgcatccccgccttcttacaacgatgtaagcggcgccgttatcataaaccaggatggcaaacctcacttcctatcaccagaggaagaggtagagcgacgacaccgactgcagcaagcagtgcgcgagaaaatgttagggctaccacgaatgaccaagtttgaatggtatcacagaacatcgggaactacaggccctgtgagcgaggaactaccaccaccgctgtataccccccgagaagatgagaagaaatgacgtcataccaagtgctggatatgcagagtattgacagagcgttggattccctactcgtgagcaggatacagcccgcagtacactttatatagactgcaggggtctttgtatgataatgcaccgagggttcacctttgaatttcatggccttggctattatttatacaagaattgcattcgtagatgtatgcgaggctagttccggaacagtctcaagccaccttcctcccgatcaacatcatcctcttcatcgctgatatcttcatcaccttcaccgagcaagccgctggccgttttgccgagcagagaagcaaagaactcatctcgtgcgcgggtagaccaggaaccacggtcatcgggggccatgaagttttggagcttttcatgcacagtgtacttcattttgcggcccttggaagcacgggtatcaatatctcgcttcaccttatcgttgcgcatcccagtaatggggtgaataggcaggcgcgagggcaactggtgcaggttgtcaaagccactggtcatagaatcggctgaggacatgcgctgttcaacaagatcgcgcaaaagggactggtagaaagccccatcatcgtagagaggttcttgttgatcagatgtgcgcgaacgcttcgaggatcgttctccaatctctgtggcaacttgagcatcgagtacggctgtgatggtctgttgacgaccggaggtagaaccgagcagtttgcctctagcattaggaagagatgcagaagtgccacgaactttcgaggaccacttgtcgagaatggaacgacggtgcgaaatggactgagactccaattcagccatacgttcccatagcgaggtagagctggtggtaggcgaagcgggggagggtcgcttgcgctttttgctgccttctttggcggtggcatcggccagggcagtacgtaaaccttcgagggtcgaccataacgccagagccgctgactctgccgacttgattgcttcctcatcaacaacttcttcttcttgattcatctcgttctctccatctgcttcgttctttgaacccaacacagcagcaataccgttaatagaggtcaatccactctgaagcttcatccgcgcgttaaggagcgcatcaaaagtggtacgttgttgcttgacagcctttccctttgtagcatcggccttggctgccgaggagatcgtggcagcgatagttttctgatccgttgccattagtttccgaatctcgtcgcggtcaacagacggtccgcttgtgtcgccatgtcggacatcttggagcgttttcttggagtgcttgtcgactacctcgtcggcatcctcatcatcctcatcatcctcttcgctctcttcgtcatcgtcatcctcgcctccctctgtgtcctcatcggaactctcctgggccagggcatcgtcgccactggcagattcttcggagccagacgagacatctgtgttctcgtcgccttcatcactttcggcgcctagtgccgcccggctgactcgggcaccatcatattgcttccccagtgggagggggtcatctttgcggagctttgctttcctgtttgattattagcgcgttgttgataccaaatacacatatctttacacacccaacagtttcataatgctctctgcctgccgtcacttcttctgtatcttcaccttcctcgtcacttgattgctgaccattatcgatatcctcgggatcaaaatctaagggcgaagttagcattgaatgtccagtactcaagaggatctgttatgcatcattcaggcatacctttaggagttggatcttcaaaatcagcaagctgatcagccagggaacgacctgcgcgtggtttacccatggtgtttggtatgaggagagaatgagagattgccgagcaacttttttactggtttttccggataacggattattattcctatctaggtttagcgcccgtaggcagtagaggttcatgtgggcggtgtacagcgtaagagcttcgactaaaggcggtcggcccttttcttggcagtatcgcagtggatatcttgcactacatattctagaactacttctgttgctcacagattattaggtcctgcatttttttcttctcatctgcctcatttggcctgtgagtatgttggttctgccgtctagctccatcactaggggtgcgaggcttttttctacatatcttgctcttcagcatgagaatcctttggttagttgttaatctacatttcagagctccggtggttgcctctcggctcactaattgactctaagaaccattctcatttgttacaagagctatttcaatttgcattgactgactatgaacagggacttccacgctctggtaccccgccaacttttcgttcgcgccgagggctgcctgagaagcgcaagattcgagatgttaacaaaattgttgcagtctcttcagcaaagggaggagttggaaagtctacaatagcgggtacgtagatattatcctcctatctaggcgcaagtgtgagcccaaatggaacaaacagtcgctaaagagatcttatcagtcaatctcgcactatcatttgcacgccgtggtatcaggactggaattcttgacaccgatatattcggtccttctatccccaccctccttaatctctccggcgaacctcgcctcgacgaaagtgagactccctttctaagcttaccaccatttcagccataatcaacatgcttatgaatattgccagacaactgcctcgttcctctaacgaactatggccttaaatcaatgtcaatgggctatctcctcccccaaacacaagccgacagcacaagtggcgagctacctatggacacaacaccaatctcatggcgcgggctaatggtaaccaaagccatgcaacaactccttcactcagtgtcgtggggaccactggacgttctaatcctcgacttaccgcccggaaccggcgacgtgcagctcacaatcaaccaagaaatcatcatcgatggggcagtgatcgtatccacgccgcaagatatcgcactccgcgacgcagtgcgcggcatcgggatgttccagcgaatggaagtgcccgtgctcggaatggtacgcaatatggcatatttcgcgtgtccacagtgcgggactcagacccgtatattttcgcatggtgatagccaccaccacgcgcacggtgagaaccacggcgtcgtggctgagtgcaagcggctcggagtggactttctcggtgacatccctctggatgctcgggtgtgcgaggatgctgatcgtggaatgccgactattgttgctgaggagaatgttgagcgcagtgcgaggcgggaggctttccttggtgttgctgagcaggtagctcggaagattggtcttgattggcactgaagggtcgactcatcttgcccagacgtagagttatgaacattgtgtattattatatcagactcccatatccggtggctggctactggctatttatctcggcattccgtttatctgggtatagactgtatttattctcagaactatgtacttccatctacaaatgatggtcgactgctagaggcctagtaattgactgcaaaaagggtatatccaacacaaggaaaataacaaaaggaaatgccaagtcgctgcacatagtttcaacaaaagagccagcaatcgaaggaaacttggacatatttaaaacgactgttcaagaggatacggatatgtccgtaaagcaattctacaaagcttactcggcggttttgaaaacctccctgtccggtatttcaggacggtgggatgtggagtctcgaccagccgcggagaaaacagatagagtatctgtggaaggacggccattctcgctaaccaagggggcaataataccccgcgcgccagtcacagcttgggtgctagcagtatcggatgccatgtttgtataggcgacggagtccttgtcgccgccaacggtactggtagtctccgacaacatttcgcttcggtcagcggctgatcctgcagcggatgatgaccggtacctgctgtgagctaaggaaagatcggatttcatcgggagagagcctgttgcgtgaaagagagccctcgtgctggcgttctcatccgtgaatttgtgattgttcaccccgggcaagataaggatcggagcagcacttttctgtgagacgggtcgagatgcagcctcggaatctgtagacatgcgtccaatagaagaatcgccgttactgaggcattcctttttatcctggttggctgccgtcggctgcgatttgttgtcggtgaggtctttatctgttctgctttggggattcgtcgctggagtgctagaccatgttccggcctgcccattatcagtgctgacacgggtggcacgtctgcccgattgctcgatccgattctccatttccattctgcgctcgtcatgtttgcttccccagccgctccacatcatcatgccgtagttcttcttggcatgtcgttttggtaggacgccaggagcagctcgccgggcggccaaagagctcgggggaggacattcgccatcaaagtcttggaagccatgcgccagctctatcaggcgtcgcctctgaacccgaagtttttccttcgaaaatctgatatcccattccttctttgcatccagccacattcgaatgagcacggggttgattgccccgatttgggcagggggaatttgtaacgatgggtaggaagagggagtgtctagcgggaagacatgtcctcgtttatcaattcgttggcgtatcatgtattgatggaacgctggaagaggatctccggccttaccgacagaggaaggcccacgtgcgttaggcagattggtcaatgcaggttgaggccccggcatatcttcatcttctgagctgtttgacgaaacgggcgaaagagcactatcatccataatatcgacctcgccgtgctgtgcacgcgccaaggcccaagagccgaactgggaaatggaacggaacatgtacttggctggtcgcgtaaagctcagagtgggagcgacatgacataggtcgtcccagacctgaagttgtacataagtcggttcgtacttgttcaaaatctcccgggtgggatcattctcatcgagatatacgtcgctcggtgggtatgccgatggattggccgctttgtgggcgatgtagaattgctcgtcacgaagcgtttcgccgccgccgctcaatatttgtagaggaggcaggccacccagagagggttgtaggactggcgaaacaagagggtgggacatgagctggttcgtcgtgtaaaactggatttggtccttgagttcgactgttttcccgcccaaggcaacgtgaatattatcgggttcggcatccaaactagcaggatccggggcttgctgctcgccagggtaggaatattcggctgcagggttctcatggatagtataaccgcggatagcagtctcttcagcactgctgcgcggttggggaatagccttattgagatcctcggaagtcactattggttggcgcgacagtcttttcatttccaggatatcatcagcattaggaggaggccaagcggacgagggtttatggcggaagccataggcaggaatataatcacctgggttgtcctgaacaatactcgggaaagagtgtgttaaatcaacccagggtgagatcaagatggcgcccgcgggtaagggaataccctggtctctcataacgaccagcatcgatagagccaagcctccgcccgcagagtcaccggcaagaatgatttcctttggttcataggacttgagcagccagagataagccgccatgcagtcatgcaaaccacatgggaaaggaaactgcggcgccagtcgatactccggtgcaaatacacgtcccttcagtttacgcgcatggcgctgcatcatgtaccgatgcgtgtcgacacttccgaagaaataggccccaccatggacatacagcatcacacggttacaatgcccaccggccccctccgtttgagcgtagtggctccgcatctcaatccactcccccttcatctcttcggatggcccgcgccattgccaccatttctctcctcccacccgtacgatacctttggggcccagctgctttttgacagcgtccgcagcagagcgcaagaactcgtccgggattgtgacggtctcggttctcacccaatgtggacttgggacccattggcgagtgaacgcctggaagtcttcgacggggtgtttggatgcataaaataggaattggcgaatgatatggataccttcatcgtaggtaatgtgaacggtgggtttgtcccgtaacgatttacgatgcaggtactatggatcatgcgctatcagcaagacaatccttaccctatcagggtattccacaacttacgtgactgatgagagtatgaaggacagtgggagtcaatgccacacctagtgcgactgtatgtaatggcataattgttctgttcggtggaaagagagtagcaggattctaactgtcgcaaaatccaaggaaaccaaaactaggaatcagacttaaatgaaagacaaaagcgaagatcggtcgcaaaatgggccgacgtcatttaaagagtgcaaggggattggaagaagaaaagaagaacatccaaacccaaacgagaggcgatgatgtcaccgggcctcggggaaaccgatctgcacctgacctccgatcacttaccccatacctccagcctttacaaattaggtctcctcggtcttccaatccaactgacattcacaatataaaccatggcgatgacaccagcaacaatactagttgcaatgaccgcccgatgcggtgctttcgcaagcttgaatccaagcccaacattgatgatacccagaatcatcatcaaccgtccaaaccagcgatgcgtataggcaaaaggtccttttctacctgtcttccggaagaatcgatgctgcaatacacccatagcaggctggaaaagaataaggcttggtacgatgatcatccctaggatggtatggtaagagttgaccaaatcaacctgtcgtgcgagggaaacaccaaccccaaagcccgcgattaccacggtcagagtgaggagttggaacgttccgtgaatgttcactgtccatttcgatgggaagagatgaagtccgagcgcgaagaaagggaacatgaccacaaaagccagaaccatgagcacagcatgggctgtctttttcctcttgactgttcgttgcaaggctgcaaatgccggatcttcactgggagagatgggcactcgggctatttgggcgaagggattcactgaactgccgcccgtcgcttttttcaggtcgacattcatgacaccgtaatcatcatgttgggtgataccctcagataaactgaccgaattcaggggctctccatatttaacggaccaaatccacggacttgaggggctgttcacgttttctgttcccccattccattttaggcaggtatcgcatcgaacattggcagtgataactccgtcgtgtacaccactaccattcagaatggtgatctgggcgtccttgttatacaacggttcaatttccccaacaccagaccgcggagaaacggtgaccttgttgccagacgtgtacacgacaaacatattggcgcctgccatttgcattccttggcccaaggcaaaccactgcacttggcgagtagaattcatttgaaagtatatggggcccgagcctgactcagcagtattgtcggggacattgaagctataggtgatctcactgtggccttgcggatgaatgctatgaacttgggccagggcaggaatggcccagagccaagcgaaaatatgccgaaccattgaaaaaaattgagattgacttatgatctaacaagggggtcatcccaataaataccctcagctctttgttgcacggttgacacaccaattgggctgcgtcaggccaagtctttgtggctgtgacttatgaatttcttacagacatttggaatacctgtcaattggttgaaatattatcttacacgatgtcgtcgttttgtgtctgagctacctaaagtcaaaggtaagacgactttgctgcgcctccccatgtcaaacatgatcagtgtcgggtcagccgcatcaattatcaaggctacggcaattctcagtgaggtcttattattggggacatatgagtggtcaaccgacattgatggctagagaaatgtccataaaattccggtgtgcctatgcttttggagtattcaaccgatgcagtaatggggaaataaagttaggcatagcttcaagcttatatctgtgtttatacgaggtcaagggtgtcatacgaggggaaaagaagacagttagttatacagcatctcatttactgtcaaactatctgtcaaactatctgtcgggataaggacgtcctctattgcaatgcataatgacgtcctctttgctcttgaattttccttctcgaacgcctagcaacgctacaattaaacctaccgatgaatacggcttcacccttgtctctcccaagaaaaggtcgaggttcatttcgacctgcagagtcattcagtgtccgaagcctttctttgtaacctctgctatcctatcgtagaaaagtgggttcgtcccaaccctgtctctactacatacttcttagactgataaccttacataatattgagacaatgcaggaagccccaaggtccctttccacgcggtacataacggcactctccacggagaatattcccacttttttaggaagatagacaaaatgagctcaaatgattgcagaggatattgtcgatcgcattctcgtccctttcttggcaacgcagaaggtccccaggaacgaagtgtgggatgcactaacaagttgaacataaaaactacaatccatttcagatgctgatgctgagctcaatcacagacaccatgcttggcaaatcatatttcgcagtggttatgatggccgctcaggctttgcctgtattcggagcgacgagggaacgagaaatggtcaaagtgacagtctccgagacggttcgaggtggtgaactagctaacattcacctcgactggcttggccaaccgccaactttgatcaaatctgtctatgcgccctgtgacaatgaacattcgttggcaaaagagcaaattatcggacagttttcatttcatggtcaccctccacagcgactggtttgggtggttccagatgaggctccgacgcaccattgtgtttacatatatgggtctggcggcccaaatatgacgcaaagggtcttaggcaaaagcagtcctgtctccttgcagaagaagcctaggaaacgatccacggcagacaccatcccattgctgaaggactttgatgcgcagggagcatggttcgacggagtggccaaaatcaaagacaaagtggaaagcagcggaggcgttgcttcaaaaggttcaccaaagaatacctcaatcgcaattgttggaggcgggatctccggacttgcaacgggtttgatgctggacagcgtcggtatacataactgggagatcatcgaagccagcgaccgcgttgggggcagattccggacgaaatatgtcgcggacactcaagagtgggctgagatgggaccgatgagacttccgtactctgtcacttacagagatgacaatgagaccctcctgtattctgatcatcagttgactttccaaatggccaacatcttgaacaacatgaacaagaatgactcgcagtggaggattgatttcatcccctggatccaacacagtcccaatgagttatatgctcaaggaactcgccgtcatcccgatggaagaatcccaactcgcgctgagatcgaggaggatccaagcctgaaggacccctcagaaatgacgagcgccgaatacagcaagaccgaggatcagatgaacaaaattctaaaagatgaaaagactctcaaatctcttcagaaggatgtctggagagcccacaagaccgccatggaccagggtctcgatgactggagcgaacaggcaatgatgcgacatgtcttcaaagccagtcagaacatcaccgacgggatctggacctcctccgactacgatgtattctgggacgagctgcatcataactccaatctcggcctagatggaagcaaggacagtctgggcgaaacaaaatggctctgcatcgatagaggattcaaccgcctgtccgaagcttttcttcctcacgtccgcgacaggcttactctcaatcgaaaagttcggaaactcgaatcagtcaagggcagtgatagtcacacccgcactcgactgtcatggtaccccaatgtctcgaatcgcacctttgagtccaaagagtacgactacacaatcatggcagcgccatttaccatgacccgcttcatggatctacccaaattctcctcggtcttagaccgcgcgatcagcgaagcaggtctacgcttcaagtccgcctgcaaagtagccctgttattctccgagcgattctgggaaaagggcgaccgaccgattttcggcggctactccaagccattaagtgactcagtcggtgcactctactaccccgtctacggactcaacgagtcccgcccgggtctgatcatgcactatcgaggcggcgattggagcgaccggtttgtgagtttctccgacgaagaacacgtccagacagtgctggattcgattgtcagcctgcacggtgaacaagcacgcgacctttacacgggtgattatgagcgcctctgctggcttcaggatgaatatactgcgacttcttggtgtcggccggatgttgcacaacatcaactatacattccggcttatcatcagacggagcataacaccattttcattggagagcacactgcgccaacgcaggcttgggttagttcctcgctgcattcttccgttcgtgggtcggttcagctgctgctggagttgggtttggtggatgaggcgaaagaacttaaccagcggtggatggggagatggatcaagctatgatgtttctgtcaagctccttggtttggagtatatcgtagcttactctaattaaaccattttcggtattttttaaaaagatttatgatagtatagtattaaaaccattatcgatgggggacagtgccggtaaaagctacgaatttactgaatacactcatagttggaagcgcttgaaaattaaattgcttagaaaacactagtacatgacgggcataagagggttgcaatgtaaagacagtcgaatagacattcgtggctccttgttgcgtattgagacgtgggcaccttttgtgcgggatgtgtgagcaatgaacaatcactcaatggtaatcttcttggtggtcgaggtagtggccttgggcacaataatagacagaatgccattggtgaggctggccttgaccttgtcctgatcgacactaacggggaaggagaaggtacgttggaattctccaaccgatcgctcgctggcccagtagcggtaagtgggctcagacttttgctcagacttttgctcagacttctgctcaacctcatcgccctgcgcttcagtctcgggcacagaggtgtggtactcgcgttccgcgcgacccttcacattcagggtctgggggtcggagaactcgatgtcgatatccttttgagagagaccaggtagctcgccgtcgaggtggtaagagtcatcgctttcgcggacgtcaaagcgaggggagaacgagcgagctgcaggctggctacgaccggagcggtggacatcatagtcgtcaaggagacgaaagaggggagcgaagtcactggaaccaggaaggctggcacgcaagagagacattttgttgaatagatcagatatgcttggagagcaggaagtagtgataacttggcttgtgaggatgtgttgatgatgaggaaaacggtgggtagttggggggcattatatagccagaggacctctcttctcgaaactaccctccatatttcaggcaatttctggaatataccacaattgcatcatgagataaactgcccggcttgttgtttccagctgtcagtttgttacttctccaagatactagatgcttctccacatttccaccacgtgacacgaaaccatagggctatttttggttcaagaagcaagaacggaaacaaataaaagaagaatataaacttagggcttatgtgaaggccaatcagaacagttgtcaaacaagtataatgctgcttatatccgacgccctatgtctatatacagttaaggcattaaaacattcaaatgccagagatccattgccaagaggggttggagaacaagtcttataaagagacccgaataatagaataatagaataatagtaaaataaaaaaaaagaagagggatgtagaatcttaatgcacagaaagggtcatcggcgcggtacaatcaggctatagaggcttagaatgacgggctagggctacttaactttgctggagtatgcggagcaactcgaacgtgcgttcgtacaacagcagtgttggacattaaagacggacgaaatagtcgggatgtctgttgctttccaacttacttcaattttcaacatagtttgttaggattgctagcattttggagaaactcctctcttgcgctgtgattggtgacttcccaatatttctaggcgcctaatatttcaggctccattctaacccggtcaagtctggcagaatctcggcttggccaatttcgtccctcttaagatcaattatcagttcactctgcacttttgtctgactggctcggattgaatgagataaatctgacactaaaagactgtctcgtcgactttaaatcatcggtccattggctcatagactccctcggcggtgaacgccgaagtgcagtgcctaccaatccctgccgtccacgtttgggctcgattaggcaagaaatacacatattgctccttccataactctccgtacacccgagtcaccacaaatttggtaaacaacacgtcaatccctctcttatctatcatggcttcacccacagcagccgttgacaagttatttgtctgtcctggatgtcagagaggtggcttcaaaagcatgggtgctgtcaaggctcattttgagtctaagggccacaaactcgcttgcagtccatgcgacaaatcttttgggaatgtaacggcgttgctcaagcactcccagaagcatgaaaagcccctagatggttccgatctcaagtcggtcaagtcggccaaaccagcaccaaagagcacgaagcaacagaggttcccggatctgtctgagtcttttgttaaagctgcaaacccaccgcccaagatcacgaagcctaaaaggtcacaggatccttctgagcccttgtctgtcaaccctgcaaaatccattgcaaagaaaacaaagcctgagaagtcacaggaattgcttgcgtctttggctgccaaacctgcgaaacccattcccaaaaaaattaagtttgagaagtccctagatcggtctgaaataatgcccgccaagtctgcgaaaccagctcaaaagcacacatcaaaccaggcatcagtaggtgctccattaaggacagacgattttgaagacctatggaccaagacttctgaacccctgaacatctcatcgcctgccatccaaaatgccaattaccatgttttgctcgagccgctcgagcaaaatttgatctttcgctacttgtcggctcgatgtcactcggacacccgtctggtcacacgaggctttacctttcgggatagcttggcagatgtcagcaggcgcccgtcgaagaagccctctccaaagacaggacatttccgccaagttcctcgcccctccgacaacttgccgagaaggagagcaatcgttcttgactgtgagatggtgcaagtcgaagcagggcgtcgggagcttgcttttttaagcgcgattgactttttgactggcgaggttctcatcgacaactatgtacagccgaaatcgagagtggtgaattgggattctcggttcagtggggtgactcctagtgccatgaacaaagctgtcaggaaagggacagcgttgtttggctgggaagaagcgcgctcgaaattatgggagttcatggacagcgagactatcctcattggtcattctctcaacaatgatcttgacgtcttgggtatcattcactggaacattgtcgactcctctatcattaccagcgaagcggtgttttacactgtacacgccggtgaaccactcaaccgcacatggagtctgaagactctgaccaatgaattggtcaattatgatatccaagtcgggaaacagggccacagtgcgctagaggatgcacatgcaacacgggatattgtgatctggtgtctgagatacccagagcacctgaaggtatgggcggacaatgcccgggatcaagaggagcagcgcatgtacgagagggaattgaagaggacgaccgaggagcaggtcagggagcaaagaagacaacatgatatggagataaagatgcaactgttatctcaaggcgttggtggtttgggtcttcatggcattggcctctctgatgatgatgccaatgaccctgattcttctttcgtcgaccgtgatggtgacgttgaatacgaatcggtaactattgaagcggctgctgtttcattcttctgatactaccatgtctataagtatctgttaattatgatgttatatgataattcaattacaagtattcagccgtgcaatcattgcgctaatcgcccttgctctccttctcttataatattcgacaagggatatgccttcgcgatgcaaaattacaggagcgaatcctatccacaagtcgatgccactcaaattcaaaaggccatggcctcaaccaaccgcaacctcacagcctggatgcactgttatacacagtgacctctgcagtcatcgacaccgttcgtgtctccccagcaatactaagagaggtctgccatatgatcgagtgactcaacctggtattgaaagtgacaaaactaggctggatgctagccacaagactgagacgcttcccatcactcatcagaccatcgtgtccaagaacaagccgaagtaccctcccaatatcaacgggagtatcattcggcccagcaaaagttacaataggatccttgagctgctcaaacgctttctccagccccaaatgctgaacaaagacatgttcatcattaggaatggtataaaggctctcctcgctcggtttgagaacaatctccactttcgaaagaatactcatcttaaccgccgtaacctcgacccgttgcacaacatcccaaatcgcactactactcccgtcccgccgcggaataaccctgataagaagcggaatcggcgacgagttatcgagttgaatcgcaaccggcacacccatcacaacctcaaagctgaatccaggaacggaagacaacccaagaatcttctgcgtcttctgcgtcaaggataaccccacatcccgcatcgacggcagcagtcgctggctgcgcacccggctcacgatactgcaccgctgcagcgcaaaccggatcccgcccgcgtcgacgttcggatgggccagcgtgacgggcgctgtcgcgcgctgcacccgccacgacccattgcgcatataccgcagctgcgcctggagatagtactcgatgcagaccttcgccccgctccattcggtgtaaaacgttccgggtaacgggtgttgcgtgatgcagcttgcttctagggggacgaagctctcttcttgtgagtggtcgcgcactgctgagagcgaagctgcttcggggatattaattgagaaggggatgttgatccagtcggttggggtgctgggggagggtatgtggataggtccacgtaacagggtctgtgggggcaagtggaaaagcttccagttgccgtggcttgtggtttttgttgggtagccttctgttattaagcgggcttttgtacgcccgatcaatgtaagtgcgatcttggcgtctggggccacgaggtgcgagtggcggttcacgctgccgattattgtatcccctgcggcgtatgtccatattggaggcgccgcgatggatatattgaggttaggacctccggttgcctgggtgggatgcatggcttcatggtggagggggaaattctttgaaaggaatttcggtcaagccactagtttcttacataactcaggcagggggctaggctattagccaaaataaggccgttagctgtcacaaatatggaattgcgaattgtggagatgagctctgcaaggatagtatggggtagacgggtcaggcaaaggcaagcggggatgtcgagggaaactcccatagctcacattccgatacagtggctgtagggaaagaaataaaccctatgagttgaatcatatctctcttgctacatggtttttgcctgttaacctcgacctcgacctcgactttgtttgtgcacttccaaggttgccagccaggcccacttttagtcgtaactccagatgaactaaccaggtagttaacaactattaactaactaggtcagattaatgaactacatggacagaggcataagtcgagttttcttgtaacacctacatatgttgggaggcagacataatcgttcgaagcgatgcaccaattctccatcaactacacatacctctgaccatctatactacctacaacgattaagacaaaatactacaacatacggtgtacccaagcaaataccagaatcaaaatcaataaatccgggtatcaaattcgcactcgaaagtgcatacatacaacctcctctcgcagacaaagttcatacatacaagtacagttccaaggcaggtcgagaatcccaccagctcactataaagtagacaagacaagtcgaaagtctcgagtcgagcaggggggatcctcaatcagaccccgataacctacaagacacaataacaaaaaggatgcacgtcgaaataatttcgaggtcactgtgcgcccgctcagacgccgtgtaaaaataaaagccaaccaagacgccgcgtgcatcaacgatgcggaatgtgtatagtcgtagccaccagtgacggagataatatcagcatgtgaaggggtaaaagtaaagtaaaggtgcggtcgttccacgtattcccggtgtacacccatgtaccgagagtggagggtatcatgtagcgtgggataatatttcaaggtagggaggtgatgcagctttcgtgaagctgacaatgagatgtatcactcattggcctgctcgattctggcaggctgttgggagtcattatgacttccgggctctgcagagccatgaccgccaccatttgcaaactccgagaacggcggtgcggccgtcgtcctttcgctcggtgccgtccgggttacctaggaccatggagaagacccagaaaaatgcggctgtccatgcgaagaggaggatcacaatgctgagtaacggggataggagcagtacgaagattgaactagtcacggcatagacctcgctcggctcggatagcactgacggctggtctgaatctggctctgagcggatccattgggtcgattgggtcgatgacgatcggtcttccactgatggtggctgcaagcaaacgagccgttcgtggatgtggaggataggagaaaggagatcgcaaagttgtgatgcgaacgtcgttgcgcagaggtatggagaaaatgagcagaggcggaaaggtgaaacaaagagtgcgaagaggagggcgaatatagtgtatagagtagcgccgagtgagtagaatgggatgatagtgagacggaactgccaatttgtattagcatagaagtattagaccgctatattgcgcacgtaccagcattagaagagcatcctggccctcattggtgattatctcaacattcgaaatgggtcgttttcggacacgggttatgctcgggttggaaagttcccccgacattactgacggctggtctgcccagctgcttgtcgcccgctcttctttgtgtgcaccacttaatgtcgagccgccatcccgagcatctgagccgggccaggcagttcctcccagtgtctgagtatggtacacacggtgttgccgtgatccggaggtgcggggactggcatcgcggcttggtataggagaggaggttcgagattcgcctacagggtgacccaatacggaggactgttcttgggaatgacgggtagccggaggtggggtaacgatcgagctgcgagggtttggtccttgatcgtgatagtaggcgggactatatgacatctccggggaccgcatggcgggcgaggatataaaaggcaagaggtgaagacggagcaagagtcgtacaaggtagacgcacagagggcgactattgcatgtagaattcaccgcatggtttccgtaatcgtgatctttctggcataaggggctctcagtggacaagttggagggtgaagggggtgggcagagagggcggaagagagacttataagagagcacggagagccgcagcttgaaagagcggaaaagccaggaaaggccaggaaaggccgtgtcaggcagcggaagagcatttcctgctgtttgcaatccctctcgccaagacgcccagatgccgagcccttggcattgagttgagcacaataatcatttgtgggtatgctgctgatccttttatctcagatcccgatcatggctatattcggcctgttcgataacagggtagggttgtgttggacaagatgtgcagctgtcctaccatgagaccaaagatgctgagcggcctaggggtcaaaggatgaattacgacattttaccacctgccaagacgccaagccgccatcggggttgataagtcgactattcccggcctctgattggtcaaccgtggcgagatgatccgcgctgagacgagggctggagtcttggcggtaacagccgtacgcacgtgatgacatgtattgctcctattgcccaatgtatataatcctggcatcttccaatgtgacggagagatgttcacgttgtatgatatgtgatctactactcagagaagtgagctgagcagaacctcacagggctactatatacacgggtgcgtaccgccaaatcagggggtcaacacggtactccccaaagaggagacgcccagaggtcggcgggtgttggcattcgatttcggagaaatattctcagattcctcagtatctcttacctaactttccccaatgattgtcctgggtttgccaagggatagtattggccaatatagatactccgtacgggatacctatctgatatccttgccagacaggaagagtcttggaagtcttggctttctgaccctttcattccgctgctccgtcgagatgaatccgattatctcagcgaatcaacacatccgacgtccgcctcagatccagaatttgctttcccctcgatgaatttcagctcttggcttgtagggtttttctgtctggatgtctgggcactgtatacaaaaccgtattctctgcttggctgccccggtgagcggtcaagagtgactcattgcgcgttctgtgctcggcaaccctctgtcgagactgttggtttccctttatttacggctgcacgctgtccaaactcccttggctgtcagtctttaccaagaatcatgcgcctttcctcaaactcagcccatgagcaaccacacatctgccatcagccaagcacgcaaaggcatggcataacaatgacaggtggcgagtgcagatctatcatatccccgaaatccgggcgctgttctaaaccacctaacatgaggggtcgtggcctgctcgtgcgctggccatggatcaccgtcaaaaatgatcgactcttccatatctctcaaatctcacagatatccggtcgaccgatttttctatcattggtcgcatattccgctggaaaagacaggtaagatgttatatatgaagacactttcccccctcaacccctcgcagagctgagatcgttatctccaagcaaatctcttctgagcagctctctcggctattcatccacgagtcaccacccacgccccacggcatatatacgttcagcttccttccagagctttcctcacccatatggttgttttgcactgatgtttccagcatattgtccatatcgcaagctcatcgaacccacgatgaatcttcgccggcactgtcgaatcgcataatcattcagaacgtgagattcaggagcttggaaacaaattaccgaagctgtcactaaaattccgaacggcatctcgctattcttcgccaattttagcattacttacaaaggatttgtgcatgcttatgcgctcgatccttaatcttcggttccttgtactggcttacaaatggctcttttctggacctgcccgtggttcctttactccgtactgaatttctgcatctcaaccaaactgacgaaccccgagttgataaagtatatcctacgtcatagactctccatcatggctaagacgcgttcttggtgtccacggggaccctttctttgtgtacgttgtatggatttcatactatttgttccaccttggtattatcttgaatatatcttcaaacactctgcaaatgaggtttcctactccagacatccaagctacaggtggtcacgtgctcatccattgggaaggttggcttttaaacagttgaaagaaatatgaatttaagtgctttttcttttattgctgagatgtgtagtcctcgatcggaatgttgtataatcgccgcacagagaagtgattcaaattccgaattgaggactcgaattcatagcgaatatataatgccgatctgaggtttcgaatgcaacaagcgatccccaaaaactcctaattcaaaattgaagtagtttatatgttcaatagtctatactctagtaaccccactcacaaaaaataatccaggttcccccattcgtggctgacgggggcttgcagccacaagtgatcaagatgtgatgcaaccagccgactcagcccgcatcaatcactgcttggtcttattggctcaacggtacctgaaaggacccgggccgcgttgagggcttgccttggggtaatgcaactatgagaccatagacccgatcctttaaacctaacatcaaatgataagcatcctcccaggtcatcatacacgactagacttatatccctcgggcctcatcgccaacacatagcaacacagacatgttacccaacagaaagtacctgacacaagaagtatctgtgccccacgtcctggaacgcatctgcatcgagcccggttggaaatggcgcactcttaggccaaccttggaatctccccacgatccctatcttatcactgatcggggagggtagaaaatggacgcatctgttctggcgttttggtctttgtcgaggtcatacaaatcgaacatctgtctctcccaactagaccggtcttcaatccctgcactctggactatcaggtcttggcaagacatgacttgaaactttatgttttatttttttggctttgagttgccttgcttttttaatttcctcatacgatgtgactggcgatgggcgtgtgatattcactgcgaggtagagtgtggtctaccgttgaccgtgcagatacgccacgcccgagaagaactcaatttgaggatacgtatacaacagtttgtatggatttgcttgacggcgctctttcactggtcaactcggaagcgccagtgatttctattcctgtccattctagccttgttccctggcccacacacccccctgcctcgattctaactctggaatcgtgtcgcacggtcatacccaccgcctcggagcatggcgtctgcgaaatcccgtcgcagggggcgttggttcttactatttatttacggtctcaggatagaagtcatgggggtctccacagtggacacagcgatgggaccgcgatgcagaggcatgcgcgcggctgatctgtctctggtcgggccattactgtgatcccggcggtgcttttgcttgcttttgacatgcttccgagatttgcatttacagtgaaggtgttttttgaagattatatattctgcactgatcaaccaaagctcggcgagaataccgaatccaagatggtagaggttgagacagggaatgaaagagaaagaaaaagaaaaagaaaatatcaattactgcaagtcacaggttttgactcggtcggcaagtcgaaataacaagctgcgtaaccccagagatctctaggaaccatatacaaaagatagttcaaccgaggctgttttctccgtctcacaacccccaacggcaaagacggcggctcggctagcaaaccctgatggaaatgaggcgtacccacgcacaagtggagtccatcattgggagaaaataaggtacacacgttcttcaagccacgtatgttggatacctacgtaggtaggtcttgcaaatgtactttagatgagacaatggtcagcatatcagtacaccgcaagggccgcgacaacagaattccacagcgtcgtcgcggttgtcatatccgggagtctcccgaggtccactggaaaatgtgtaatcaagatcggcgcatccacaggcatgcaccagccacaagcacagggccatttttcctgtggctgacgaaaatttaaaatgaaataagctgtggatacacgctaagccgcttaaagcgggtacaataatgacggaaggggcgaatatgcaagtcaaggtaccctgcatggggactccaaacaaacccatgggctttgaagggggtgcgacttggattgtatacaatatactccggagaaaaatgggaaaaaaaggagaggggacacagggtcactcgacagctgcaccctgcacagttccgggtttggtctgtctgtgctggtcttgcaggccattgacgtagacggagtacggagtacatccggaggaattagctctatattccatggctagatacggacagatcgcataaagtacgaagaccgggacaaagaaaatcaagtcactaagaatgatccccggaggtagtctccgttctcatttgacgggggattaagtacggacagtctaaagtgctgggcaaaagggggggggaacaaggatctgagaaagccaatgcggctgcacggccctgtgggctacatagcaccacggagcacagtcgcactaacgcaccttagaggcaaccacggggggagtccccactcggcgccttttgccgggggtttgtgtgtttgtgttttgagagagattgggcattatgaattcattaaaaggggagagactatgagttagagtacatttctatacttctagaaactgcccatagaataaataaccataactcttcttatatgcttaattctctcatgagatcatgggtgggttttgaccaagaaaggaaaaaagaaaaaaaagaaaaagccaaaaaaggagaaaagaaaattcaaaaaacccaaaacgggccagaaaataataaaaaagaaaaaaagaaaaccagcataaccgcctccagatctttctccacaacgctaagccgttcctgagtgtcagcttggcttatataatccgtcgtgacggtcggagctacccaaccactagcgtctcttggcgaatttcacctttcctgccagcccctcgactcttccctctctcttccccccttaggcattcggatcatcttcaatactgacttcccctttccccactgtatcgccttgtatcttcgcctctttcttcaatcctttatttttgctcgtctaccctcgcgcaccaagctcgacatagctgtgacctaacccgctgccccgagattgtgtcactgccatatcgcgccactcatatatcgtcgggacagcgccaaggtctagtcgattttggaaaactgccgccattcacggcttgatagtgtcgcgtgagggaccgtgacttctttcgcgacccgttgtttttttttttttaccttgttcctagtcgatcggaaattgcgcctccggattggcgtgcgatatcacacgagcacacttgatcggtgtctaatagtggtgtgaacttggattgcatcatcgtgtcgcaaacctaccccgagagttcggtcgcgacacggttcaactcaaaccatattcacgattctcgggaaccatgtctcatactcaaccatcgcccaccacgggcgtggctcctcaccatgccgcagcgcatctcgctcatgcgcaagcgcaggcgcaggccaatggtcatatgtccgcaattcccgtgcaaggtcaaaagggagtccctactctcaccaccgcgcaaaagatcgccacactcaatgaacaagtctggcttcaaataggtaaatattcccgatcctcataatttggcgaatcctgacagcctcgtttgtaggaagcttgaccgaattgatgggcgatctggagggtgcgatgaatgcctacgagcaggctctgcgtcacaaccagtggtctatctcagcgatgaatgccatttcatgcattctccggacaaaggagcagtttccaaaagcaattgagtacttgcaaaatattttgaagttggatccgagcaatggcgagacttggggcagcctgggccactgccatcttatgatggataatttacaagaggcatacacctcttaccagcaagccctttaccacttgcgtgaccccaaagtaagccgttttcccttaacattttccctcgaatatttctctgattcaattctctcattaggaacccaagctgtggtatggaatcggtatattgtatgatcgctatggctctctggatcacgcggaagaggctttctcgcaagtgatgcgcatggcacctgatttcgaaaaggctaatgagatctacttccgcctgggaatcatatacaagcagcagcagaagtttaatcagagtttggaggtatgtgaaatctcttcatatgagcgagagctgtcactaactcatcctagtgcttcaaatacattgttagcgatcctccacgccctctgaccgaagaagacatctggttccagattggccatgtccacgagcaacagaaagacgtaagtcatgcttccctacactcttgattaccttgtactcattcaatcctcagtttgaatctgcccaatccgcgtaccagcgcgtcctggagcgagatccaaaccacgccaaggttctccagcaacttggttggctctatcaccagcagagtaatgctttccaaagccaggagaaggccattcagttcctggaaaagtcggtcaatgctggtaagtcacaatccccaggactatatacattgaaactaattcatcctttccctagataacaatgacgctcaaagctggtatctccttggtcgttgctacatgtccatggcgaaataccccaaggcgtatgaagcctatcagcaagcggtctatcgcgacggccgcaaccctaccttctggtgctcgattggtgttctttactaccagatcaaccaatatcgcgatgccctcgatgcttactctcgtgcgatccgcctgaacccttacatttcagaggtctggtatgacctgggcactttgtacgaatcatgcaacaaccagattgccgatgctctggatgcctacggacgcgccgcagatcttgacccgagcaacgttcacatcaaggctcgtctgcagcttcttcaaagccagttgtctgctggcacggctggacaacagccaccttctgcccccgcgcctcagccgcaggatgttcatcctcaggcttatcaggcacctggcgttggtgcacctccagctcctcagtggggtgcaccagcccccatcggtccccctccacaagctcctgcacccccgagacagattcctgactggaaccgtgggatcaacgagcttcagtctcaaaatcaagctcccccatctaacggccttgaccagcgcgacgctcggatccccggtgctcccgctcaaagccctcgacaggagcctggtcggtcgttcccggatccccgtggcgcgcctcgctcgccaaagatgggtgatcccaactcctacccgccgcctcacactctaccccagcttggaaatgcgcctggtccaagccacgaacgcgctcctagtggcagcaatgcctttggtgctccgcgtggtgctctgccgagtggcctgcccgtcgctcctcctggtccccctggacctcctggacccaatggcggtgctcctccccctccttaccagaaccgccctttcagtcctgctcctgagattcgccctattcgcgaggagcgtccctcttcgccaggttcaggataccccctccaacagttccaccccggtcctaccctccccccacaagttccaggtggtaactccatcgcctctggtgccccggcccctgcttcggctgccactgctgctgaggctgccgcccgtgatcgcgaagatcgccccgcatctgcaatgaagcgcggccgcgaatgggaagctgatgctggcccagtcaagaagcatgcaaatgaagagagccgggctcgtctggatgaccagaataaccgccgcccgagcccacccgctcgtttgccttctcctggtgagatgcaacgacgaagctcctcagaggcccgccgcgaggacgcccgtcgtgccaatgagaactatcacccctcagaagctgctcaccaccctcctactctgccttcgatccaagacatgcctccccgtccttctgctggccccagtcttcccccgatggccgagagctctgcacctgcacctaacgctccccccactggacctccttccgccaacaccccggtcaaggaagaagctcctcgtcctgaggctccccctgcacacgagccccccgcgcgtaagatggatgtcgatgaagactacgatgatgaagttgaggaagagaagaaggctgctgcttctaagggcagccccaacggcagcactgctggcaaccccgccaatggtgctggaaatgcccgtgccagtactccatccaagatcgagcctacggcataaaaatgattcctctcccaaccagactagtgtctggctaatcctggcaaagccgattccttgcttctcccttcctatctttcagtgtgtgatgtacggtatgaatgtgcgagttacgctgactgcgtagtttcaagcgcgtgcgctgaatactcatgtctgttcgttctcttcttatgatttcttagtctcctttcactgtgaatttttaatggtgcattaggcacccttgaagcaaaacatttgtttgatactctgaaatttggtagagtaaattcataatgtctcctttttttccctctgtaaggtccatatctcattccagcccacaatgtggatgtcctaaaaccatattttgctggccgtttgccttggcagcaggaagacccataaaactcgtgggcccggaaaatctggacagcacgtgactggaccagggctggattagataatttgggttattgtggggtgcctcaggctcagatccgccaagagtctcgcttaggttagcccacacaccaagcgtgcaaaatcaacttcgacatttccagatcgtcctcccaccacctcgacgactaacgataacagggtcaagatgtgagtctctcccgattgaagattcctatacaatcgccattgaatacaattgctgacctgctttcgtctttcaggagtcaccggaagttcgaagcgcctcgtcacggttcgtgatcacctttttcctcgatatcgaaatttcgaaatacggccactgtgtgtgtacagtatactgattatatctccaggctccctcgcctacctgccgcgcaagcgcgctgcccgtcaccgtggtaaggttaagaggtcagtactctggaagaatttgtgatttgtggatttgtgtgctgagactttttgcgacagcttccccaaggatgacgccaagaagcccgtccaccttactgcctccatgggctacaaggctggtatgaccaccgtcgtccgtgaccttgaccgtcctggtgccaagatgcacaagaaggagattgtcgaggccgtcaccgtcatcgagacccctcctgtacgttttccccgttgtgtgcgaaagtgaaggagacacaaaaaagaagggaccggaacctaatatctttttttccagctcgttgccgtcggtgtcgtcggttacatcgagactccccgtggtctccgctctctcaccaccgtctgggctgagcacctcagcgatgaggtcaagcgtcgcttctacaagaactggtacaagtccaagaagaaggccttcaccaagtacgccaagtcccacgccgagagctccggtgcctccatcacccgcgagcttgagcgcatccagaagtactgcactgtcgtccgtgtgctcgcccacactcagattcgtcagactcctatcaagcagaagaaggcccaccttatggagatccaggtcaacggtggctccgtcgccgataaggtcgaattcgcccgcaacctcttcgagaagaccatcgacatcgactccgtcttcgagaaggacgaggtgattgatgtcatcgccgtcaccaagggtcacggtttctccggtgttacttcccgttggggaaccaccaagctgccccgcaagactcacaagggtctgcgcaaggtcgcctgtattggtgcttggcaccctaaccacgtccagtggactgtggcccgtgccggtcaggacggttaccaccaccgtacctcttgcaaccacaagatcttccgcattggaaagggtaccgatgaggctaacgcctccactgagttcgacatctccaagaagcagatcaccccgtatgttcccccctgatattttctgtgtgttttttaattctaacatttctctagtatgggtggtttcgtccactacggtgaggtcaagaacgacttcgtcatggtcaagggctccgttcccggtgtcaagaagcgtgttatgactctgcgcaagactctgtacccccagacttcccgccgggccaccgagaaggtcgagctcaagtggatcgatacctcttccaagttcggtcacggtgctttccagaccttcgaggagaagaaggccttcatgggtaccctcaagaaggaccttgtggagactgtttaagatgtttaagcctatggttggcggtagtgcgacgtttcatattcaataaaaaagcgaatatccttcacgatttgcatgtagatgtatactgtctagatttataaattcattccagtgtatggagaattctccttcaatgatatatttcttaaatcgatattttccgttgcttgatatatatctggttgggatgttgtacgcagccgaaatgttcagctggtcttttctttcccttccatatatctatcttgattacatcccctaaaattatcctcactctctttactcctcccaatataccatactccaatccgacaagcgggtggtgaacaaaatgcgccagtccaagattcattgcgtcatcccacacctttccctgccagccccgacaagaaaacgggctttgccaatctcatcctacactctacgatcaaccttccaaagagaacatccacaacaccaataccgtcttctacatcatctatataaccaaaccagcctaagaacccaccccacaaacgcagcgcaccaaacccgcttcttccccgcaacctcaagaccgcacccacaaaccagctcttcccccaccaagtcccccttctcaacctcaacacaagccatgtcctccgacgacgcctacatgtccttcctggacaaagcgaacgcagatgtgagcggcagcgccccacagcaagggaccggcaccgtcaaaaccgagaccgtgcacagctccctgtcagtgccaaaggcgctccagtccgtcgacgcatactacatctcagatacagacgagcccttcgagcctgtggcattgaagtgggatggcgctgccaagggagcgtggcctagtgctggtatgttcctgatcctgatcctccttcatgaacttactcccttgaaaacctgagacaaaatctacaaccaccctgctaaccaccctccctcactgcagaccagctctcctccctgatctccccagacagcgacctgtcccagtccatctccattctatccccctcctccttcgacccaaaaaatcagtactctgccgctctagatgctgtccgcgccgcggctgtcgagaaggattctggtgcagataagtcagccgttgagctgaaggtctatcgtgttgaacaaactagtaccaagatcgagtactgggttctggcactacatgcgcctgagagccgtcttgtcggtttgcgcgccaaggctgttgagtcgtaggtgtccagactatatccataatgagaggtcttggggtcagtataagacataatattggttttgctatttgtctattctaccgaaatatgatatttttatgagaaagatcggtacggatttcgtgctgccttgttttttcgatatagaagcactggcgcggaatggataaacagggacctcatcctactttgcccttggtataagttggccctgacaggtttttgttcgggatttgtcgcattcttaagccccggggttggggtttgaggacgcgtgtcaatggctgtggaaacaagttgaattggattggtcaattaatgttgaaaggaacaacactggtaactagtcttgtacgtcgctgtttgtgttcaaaggaatcatatgtagatttatctagttgtatgttgtatatcgcgctggtagccggggtctcgggccatgtctctcatcttcctcgccgattcgccctttgcttcaacaacaccccgtgcatctatcggagcaactttaactgccattattactgtatttggacctctccaggttcatgaccgtggtgatccccgaattccagctagcattcatgccgggccattccttgggccctggggagcaacggaaatgccgcaccctagaatagccctacctagggcatgggagctaggatagggcttcagaccatcagcctatttcaatcaatcgaagcagacagtcaatgatataacgaagatgtcttgagctatcaaactgagtcttgaatagtatctactatcatccacggtccatcccaaaggctcgggaaaagagaggcataggcataccactggttgcccccttggacctctgtcattcctgtctcctcgtgagcccaaacaagacccctcgggccatctaggctcttcttttcttctgtgtttttggccttctttctccgttcagactctgtctcttttatcgtcgccgagggaaattcgatgctatccgacctgcgttcgttctttcgctaaaatattgcactcgtcgactgtgcaatataccagctttggtcttcagtctttaccgttgaaataattaggaaatcgctgggtgacgaatcggaagaaagaagaagcagaacatcacacccatctgctctgcaaatcccaccaacgactgatacaaaagggctgttctcgcggcggaattgaaggcacagcaaggcctcaccagtacagagcagagagtcgtgtcggacttacccaggaaacttgaaaatcgatcaaatgtcggaccacggctctgatacctcagaggggaaggcgatgcctcacatccgactcaactccgggcggcaggatcctttcctcgagtcaaatgaaggctatgcgcctctcacatcgcggacatttccccggcccttgacaccacagggagccgaagcgcctatgccggtgagccctcaagcgatatcaccatacggcgtatcagctgcccccgagtcctcggaattcctgctgcccccgaagttgaggcctacacagggacatggtctgactgacactgaccgcaaccggtctccggatcggtggtctacggctcgctcgagtatcagctccatgagccgcgagagcactttccactttgatccgttccaggactcgagggcgccttcgcacgctggtagtgaggattatgatgtcaacacgcagactgtgtccgggaagttcaatatcatgcccactgatggattgttgttgtaccccgaggacgtggagaaggatgactacttgcacaacccggacccggcggacaaggatcgtgattgtgacatctggaatcgacggggtattttgaatgtcggtggtctggcggttttcacaataggtcttctggtgcttttcattggctacccgctcatgtaagaagttgctggcttatctgactgtctctccatggctaacagtaattgcagaacttggttggcgggctttgggaaacatccccatgaaggtatatgccacccagaagacacgttgtgtttggatgttggagagcgaccattgttgggaaacctgcgccagagcttgattgatccagacacaccgaaagaggcatacaccaagaaaagcgccaatggaaaggagatgaagctagtggtgagttatttcataggtcgacaatgagaagtggctgacgttccattgtagttctccgacgagttcaacatgcccggtcgaacgttcttcgaggacgatgacccattcttccaagcagtggatttatggtacggagtgacacaggacaaagaggttagtataaaccatgtcacaaatcatcgctcaatcgctgacattgcctagtggtatgatcccgacgcagtaaccacagcagaaggcacccttcagcttcgattcgatcacttcaaaaaccacaatctcgagtatcgatccggtatggtacaaagctggaacaagttgtgcttcaagggaggccgtctcgaagccagcatgtccctcccgggcgatggacatatccaagggttctggcctggcttctgggcaatgggtaatttggctcgtcctggctatgctgctaccaccgatggtatgtggccgtacagctaccatgacggctgcgatgcaggcatcaccccaaaccagagttcacttgatggtattaactggctgcccggtatgcggttgcccggatgtgcctgtcccggctctgatcacccgactcctggtgttgcacgcagtgctcctgaaattgatgtgattgaaggcagcactgctccgctgtatggtgacagcggtccgttcgtcggtagtgcatcgcagagtttgcagaccgcaccatttgacctgtggtatctgcctgactatggtgagttttttttttatcttctccctatggaagacatccattaaccaaaaaactcagacttcgccgctgtttatgactcacgcgtcacccaaattaactcctaccgtggcggtgtctaccaacaggccatgtccggcctaaccaacctgaatcaccgctggtacaacggcaccgaattccaaacctactccttcgagtacatacccggcgcagaaggagaggtgacttggttcgtcggcgccgagaaaacctggacattggacgctcgcgccatcggacccaacggcaatgtcgggcagcgcatgatcccactcgaacccatgtcgctgatcatgaacatgggtatggcggataacttcgcgccgcagaacaagagcatcattgattttatgcccgccatcctgcgcttcgactacgtccggatctatcaggaccccgatgatgagagcgttacctgtgacccgccggggtatgagacgactaagtatattgagaaacatcgcaaggcatatgataatgcgaactttacgacttggtatgtttatcgctggtttttctcatttgcattttactaatgattgaactttagggacgaggctgggtacaattggcctaaaaattcatacatgcacgactgtccggctaattagattctatcatttgttgtctctttctatcctaaactgttagtcgttttagcggcattgtttgctggcgttattggggttgggcatcacattatattactttcgccattcatcatcaaccatttgattctcactctttcttcgtagagctcatctagtcttctctcacctcaactccaaccgtatgacgtaatgataaacttgatatctactaagcctagttagggggttcaacttcgcccattgtacaagctcaccgcctgctggatctggccacagtacggacacgccaagagggcacgatatctcaacacgttgaatcgttataacttgccttctatctgcagtgccgtgaatatgtatctttgaacttcattcttgaggtagaattgattcctgtcaaccaacccctcttccggaggtgaccagtctctgcccttacggccaatatctctttctcatccactgacactagctatagaaatccggggtcatacaataggatatacatgaaattatctgccattcatagatgtgaagcacattccacagaagaggccttttattactcctattttcaccagtcattggttgcaccccacacatcaacttaaaccccccctctcgatcacttgcccccgacttatatcccatatccacatcttcaccatgtccggcggacccataaatctcatctcagacacagaatctgaatcagactccgatggcggcatgcaactcgacgacctaaaccgcgccgacggcataccaatgcacaacaacggcgaaggtctcgaactcagaaacgtggacggcataccaatgtcccgccctggatcaagcgatgatgcttggaacgtgaatggaactacatctggatcggacacgggtatgtcttccaagttccaccatctcatctctatccatctccccgaaccaagtgaatcatagtccagtatacaaactaacaccgcgaaaaggaggattccgcgaccgcgccccgaaccccctcacggcatcatacaatcgcgccggccaaggcggcacggagtctcaaaccgccttcgagaaagacgctcgcacacgcccgcatctccgcgacgagaaacacgccgcgctggccgtcctcatggacaatgagttgttgattacgtatgcgctttcctcgcgagaagtacgtttaccaccctgtcctgtccgatcccagccactatcactattacaagtacaagtaaattaaactaacaaaaccagacaatcccccaaacccgccgacgcttcctagcaagatatctcgcgcccaacgacccggacaaagcagaagaactgtacaacccgcgcttctacatcgcgcctgacggggagggcggggagggatcgcttattcgcggtcggtaccgggagattattggggatattgatgatcataactggcataagccggggcatttgaggaccttggatgcgaaaaagacggatgctaagagtaagaagagcaagagtggttcgcggtctgtttcggtggggtctttttccggtgcgaattcgccgagggtttctgggggtggggatgaggagaatctatgagttatgaatatatgtttcttggtcttcaaggctacatagactacagactactaatgacagatgataatataatgttatattcgctaaaacacattagaataaactactatacagagaagcagatcaacgacagggccaccaacccagagaaagaagaagagaacaaaaataaagataaaaggggtatcatcgaggggatccaaaaagagaagacatatgtagcttctctgttctttttgtgttctctcctccttcgatctctgggatattacccgaagactcaggcaacgcggtagcactgcagtccgacttgcgaactcatctttgcattcttgatggaacagctgagctggtcacagatgccatccgagtcggagaaaaggaagatgagatataagggtaaccaatcagaagacagggtagatgccaaggcttacatctctttctcctctctcctccgttgctccgagtggaacagactctcgatgtctccaacctgcttacgctccgagacttctcggttgagcatgcgagaataatgggcctgggcattcatcagtgtcagtcctcgagacggtacgggatcgtattccgggtcattgtaaaaaggttgcaggcggtgcgaggtggtgatccggatccgaccgtctctcatgacaggtgattgtcattgcaaaggctctgagcttgaagagaggcggttgagatggaggtagacatcggtcccgtagctggagatcaattagcaagggatcggacagtttaagcagagaataacatacccctccatactgatcaacttcaaatcaccgccaaagtaccgagcgtatagtcggcttactggtaggccatatccaaatccagccatgggtgctttgaagtcgttcttgtcgaaatcagggtccaggttgggcgtttgctccactgtcgtgtacatgtaggtccatacgagggggatcgacgaccgggggataccaccgccctcatcggagatcttgatcgtaatgtcctctttgccttcggctactattaccttggtcacggggaattcatccttatcggccccatgtgcttcaacgaccgcccggagcgagttcttgagggtctcaaagagcatgtgcgataggtgtccgggaacatacatgaagttcaagtcctccttgcagaccagctgcaccttgggcgactcgaaaagaccgtagtaatcctcgcagacgaagcgggcgttttcaatggcctcgagcgcgatgtcgcgaacgttggtcttagtacaaattattccgacataattggggtgtttgacatgcgtttgttccgtgagtgcgatgtgttggccgataagcattcgtataccgatccttgacatgtaaaaccggtcgaggaaggactgaatcgtggagtcgatctgcatgcgctgacgcgcacgtttccattctaggataccttgcgcgacggtggtcacaaccccgtcgtggcgtcgtttgatctgttgaagggtcttggcgaatcgttggttgtagtcgttgagttccggaggccagtttccgcggtcgtcggaggggaagaagtaccgtcggcctgaggcggcgggtgacctagcaacaccatttccattggatgcagtaacggatgaccggtactgtccttcacgcacgctggggttttgggttgtttcagagaggatttttgacgggccgttcatccggccgggtcgcaacaggcgtgctttcacttcctgagtcagagtggggcggggaagagcaatgatttcctgatcgggtcagtatatggatccgggatcattattaattggtgagtcacatacctcgaatgattgcgcataccagtcctggacctttttgatcgagggcatctcgctaagtccatctggaagctcacccagatcttgcacgcgatgtgcgagacggatcgggagctcctcagacaggaattgagaggcgcggaatagggtacctggatgagagttagttatgtaactgtagatagcgcagacccgttcatagttcatacctgttgagggacggtccccaaactggaccatctgtctcagcgagacaccggttgcggggaagctggcataatgtctgatggtgtccatcagcctttccgagggcttccacatggtggtgatatattggccgaatggccttggaattgtgttttctagaaagtgatctatccagagagaagttgtcgaggaggaagtgtgagtgaatcgagtcatcggttttcactgccgaggttgaccggtccccgggttttctccgcctctccgcttgcgctctccggggaccggaggaagatcacacgacaggaataagcaacgtatgatttgtatcttaggaatgctggcggactgattttttgctgggttttctgtttttctacttcttttttatattaaaaactacattcacaaaggagaagtgttatattggagagactatgcgattctgaaagtccgttcacccgtggtctatgacataattgtgtggcctcaggcaggaatcacatgttagatatcagctgatctgatgttggggatgtcggggatgatatccataccactcatgtctttctttctagctattaacaaactaatggtaccttaaacacaatatgaatcacaatcattccaattatcaggtctgcattgattttattaatggcattcatggcttattgaagagaacgttcggtctaccagtatgtgcctgaagatagaatgagtcataaacatactaaagaggctcactaggtaaataccctggttgaaccaattgcgtatgatcctaagtgcccctttaaatacaataactttgtgtatcgcgtctctctgccgtctccactcgacaaagagaatggtgcctggcacaagcccggttgtgtggctattccttccggcgttagtgatctgatccttcgtctgacaaactctgatgctacatctatgggagcagcgaatcgtgtcgagaatgaggttgctatgatgactctagccgctgctgcgctagacccaaatttcgagccccgcgttgtgcctcgcctgtatggctgggctggaatcacatctaaaaaaggggagccacagcaaggttggatcctacaggagctcatgccaggcgttcccctagacgaaaggctagataacatggaactcgaggagaagaaagaaatatttgcacagatcgcaaagctccttaaaggccttcaggacttcccgctacccgcctctattactaaatttggaggacttacatttgataacgagaacaacataatcagtgcaccaatgaccaccaccagtactggtccctggccctcgtacgaggctgcatttgaagcacggcttaagcaagctccgaagaaaaccgacgagaatccttatatccagggctggcatgagaatggcgtccccggttggaggcctttatagagcgagggctcccggaatctttcaagcaacttgaatcgcacaacgacaaggcaataatccacgcagtttttagtaagcatatttcccttgcacctcccgaaccctacccgcttgttcttatagatgttttctatcagcacccaacaatctgtgattcaacatttcctcaggtcgcatcacaggattaattgactacgacttttcgtgcgttctccatccttcatacgagttcctttgctcctttagtggggttgggggcaagtttgggggctggccttgaggcccgtgaagaaagggccctcaaggaagccaagttacacggcttcccagaccctcttcccgatgaccagcaaggtagcgagggattacagtggaaagttgccaaggtttgggaagacgcccttcagaacgagggttgcaagcgcccaataacaacctcagggattgacattgtcgccgatgtcgatgccctgcttagttctatcctgccctggcgcgtgacaaattcagacattctgaggaggcaaacttgtcaagtcattcaaaactgccgaaatgagaacgagaaagtcctgattgagattctggagcatatagggttctagaattattagcagaactctttcgggtccgatttaagccagcgattcacttcgagcctcgccaagctgttgatgtttcatttgaattctgatctatccagttggtatattcaatagcaaggcttatgatataattaaggaatagcatatgtacttagggtaccggacatcacctacagaagttactctataaccaatgaacacgtgactgtgactccgactttgggaagtatacgccgtaggaaacgaaggatatacaaggacactcgttcatgtgcttggtttagtttttcgtcaatcatacattgttacttgcgtttacctttttactgatgacttccttattacttaaacacggaggactcggttatatcatgcataatctcacgtacttttgtcaaccctgtcctctcgcccccttttagcccttccatggccatcgctaagaaaatgaccagccccgcggctatctcgcattggcgcaatcactggtcttctcgaagaacactccgttcatatcccatccttgatagagaagaaaagagagggaaaagtcatcggatgatgcaacgggccacgttcccaccgctacccattcgcccgtccaacagatccgctttctggacactcaagattctcttttcgagctcttgctgttgtcgagcgattattatctctgactggctattatttagcccctcctacccttttttgtgtgtgcgttggcgaaaaaaaaatcccaatatccccgaaaagaaaaaaaaaaaatacaatcaattctggccctaaaaaattatctcaaatctccaaaacctcaaaatcttcatctcctcaattccattgacaacccgtgcatcggtgcctcgaatgttgaaccctctcccggcctatacatagggaggaaaaccgtccctccgaaaagcgatagatatataccctccggaatccacaatccacacaaatgtctcgccgtcgaatatcgcacagcgaaatgaatgaggctctcgcctatcccttcatgcagtccaacggcccatacaacagtcagtcgaatggacaaccccgtcgaggccccatcgaaggtcccaatggccgtcgcctcatccgtcgcgtcacatggcgctcctccacatacaagctcatggccaccctgtgggtgctggccgtcctctacatcgtctggctagtccgcgacctcttcttaccgtccaccccgtccgaatccagaccaacccctcctgctcaacccgaacaaaattaaaggcgctgtgtgtgggcccccctgggagggggcgagaattgcgtcttggattgggtcgtttctgctgccggagtggggggggttgttttgggggcccattgcgggcttttgagcgacatgtcgggctttctttttggcattcccgtatattattcgggtcccgaggagttagacttggagagctcttgggcagggatgcattgcgcttgagggatcatgctttttttttttgttttggttccgggagagatggcgctgaagatacgtccacattgctggcttgtgtggtatccggagattctccgggctaaacctactggtaatggcgctgttggggtagttccggatggagccctggagtgttctgcttgtcatatgcgggagtcgactagtagctctctccttttggacttctaccgactatatctgcggtccggcgctcaattgacccaaacagctttcttttttcttttcgtttgcatgtcagcgttctattgcatatgggtatgattaccatacaggccgatagcctgatcgagcatttccgtcttctttcttattctcttattcatgggcggttcaattgtcttttttttttccccatacagcaaaagcgttgatcattttctcattctagaatgtctgttacatcctcttcccgctctgacgtccatgacactccccaaattgacccctcccctatctcaacccctcgaagatttggagcgcggggcatcggggaagcagggaagtggggggggaaatttccctctgagagatatccacaagtggaacataatgccttgcattcaatttgtatacacagtgactcccttctctttcacctataggaaatcccatatctcccatcgtctttttatatataacttttcactttctaacagatacacagaatacgactgtactaagggtaccttaaacgaacagggaagaggtctcgcccttggcaatgatgctcgcgtagggcttgatggccgcagccacctcggtgctggtgaacttctcgacctgctgaggtgcgcggccgacgaaggtggtggcgtcgagaagggtgtccagctccgggatgatgggggtgaagaacgcgttgcggcggatgcgctcgatgaggtcgttgtccttgccctgcttcttgacgttgtcggcagcttcgcgggagagaacacctgcgtacgttagaattccggtttggagaggaagatacggagagaaacttacggatctcctcgtgcgcgtcctggcgggagagacccttggcgacacaggccatgatgatgttctcgctgagatatgtgttagcaacatccattggattcgttaaagatgtactcacgttgccataaaggggagctcatcgttgacgtggcgcttgatgacctcggggtagacgacgaagccggaggaaacgttgtctaatagtggtcagccataatccgagcttctaacaactccgaaactcactcaggaggatgagacaggcgtcagcagtcaggtacagctccgggagactgatacggcggatagcactgtcatcctagtacaaagttaataaatgattctagacacatccgcggtatactcacaagagatcgctcaaaccactgagcggagtaggtgtccaagcagtccttgggaaggttctgcaggtgacgtccgagcgagcacagacgctccgagcgcatggggttgcgcttgtaggcctacaaataatcagctaaaggacccaacacaacagacaaacaaactcaccatggcactgctgccgatctggtccttctcgaaaggctcctcaacctccttgagcatggcaaggtgacggatgtcaatgccaatgcgctcacaggtggaaccgaaagaaccaagagcgttggcgacatcaacatcgatcttacgcgagtatgtctggctggagatgatgaaagcggagctgaagccagccttctcggtaacaagctcgtccaggctctcaaccttggcgtggtcaccgtggaagatctgcaggaaagacgcctgagtaccggtggtacccttgacaccacggaagcgcaggtcattgcgggcacgctcaaggttgcgcagatccatcagcagatcctggatccagagacaagcacgcttgccaacggtcaccagttgggcgggctgaccgtgagtgaagcccagacaagggaggtccttgtactgctgagcgaactgggacagcttgtcgacgacaacagccagcttggggatgaggatgtcgagaccgtcgcggagcaggatcagatcggcgttgtcggtacagtagcacgaggtagcaccccagtgaatgataccagcggcggcgggggcaaccaggccaaaggcatggacgtgggccatgacatcgtgtctccggcgcttctcctcctcggcggcaacggcgaactcgtcatcctggataacctcgtgggccttcatctgctcgatagcctcggtggtgataggaagtccaagctctgtagccaaaattcagtcaattgatgtgtttcatcaactacctctgatcttcgacactcccgtaccttgttgggcctctgcgagccaggtccaaagctgtctccacgtggagaagcgcttccggggggagaagaggtacttcatctcattgcctaatcaattgagtatggttaatcccgatttgtacaatttccggggttgcccctcctatagaggggcagttgggaccgacttactcgcataacgcgagttgaggggggtctggtagacatcgttgcttccggacattgtgtcggtggttgtttgagatactcaaacgaagaattgagcaacgagacggacgataagacagggacaaggcgatgtgcgggcaaggaattttgcttgcggcccggttttagcggggcttatcagtcacgttatcgtatgatctacatgtcacatgatatcatacgttctatgggatgttttgttgatctaccagtagggaaagcaggcttggtggtgcatacattattatgatattagctcgtatagatggagtcctttgtgtgatttcactctccgctccagataatcaagccaactgcgccagctgtaccgataggcttgccttgtcgtacttgatgtatttaccgcggcctttgtcgatctcaacatatcgatcgtaaaagcgcgcatacaagggctcgagaacagtttgcagctcacgagttagtaaagagcgcacctcacgctccatgtgaagggttttgtgccgagacaccatatcctcgaagctcgcgttgaatgctttgaacttgtccttgatcgcatccttatccttggatgacagggacttgacgatggcgcttgaatccacgttgccgctagaattgcgctgcgccccgcgggaggtatactgcacatcaagaaggtactgggatgtttccttccatgcatccagataggtagacgtcgcgcgcttgcggaaagtgtcgatccgggcaatactgtcggggttacccaaataacgtgccagttctgggctctgtcggatcgaccggtcgaccacgcagaacacgttggacaagaacacaccaagcgctgccttcgatcgatggaaagcccgacctcgaccttccagggaggtcatcaaggcctcgatcatatctagaatgaaatgcgacagaagtgtgctgctgtctggacctacatctagaggagccgagccagcggtgttggacttggcacgccagtttccatctcccagagacgtcaagatagaagccaaagggcccgagtaccccgtcagtgtggccaatgagctcatcacttcttccacaagaggcaccgatccaccgtccggagggagcgtggtattagcagccttgcgcttcgtttcctcgagcaattcggaaagagacgacttggcagtctcgcgtacaggtcgaagagcctcgatcaagaggctcttcagttccgcggccttggagtcaatccgataggacatcgcggtcacaatttcgatgatctcaaaagccaagaagcagtctgtcatcagattggtcttgatatactgattgagctcacgaagtgttttagagtattcgcccatagccgggaagaacgtagcctgcaacgctaggccctgctgatctccagtaaacatctccacaataataccgtgctcggtagttataaaggcctccagcgcattcgagtaaataccaataccattggtaccctgcttgtatgggccatcggtgggtcgccgtttgacggtattgagggatgcaatggcaagattctccaagctggatgcaatgtatggtccccgtacttccgcataagccttcagcgcggggttgtcccccttcccgcgctgagatccatgaacggatgccgagccgactgccgaacacaagggcgccatgtgggtgacggtatcttcgggtatggatgggaaggggagatctagaaccgtcgcacattagatctgatttaggtttcgtttggtcgtgatacgcgtacctttggtcaaatagtgtaggggctcgaccggagtggaatgctggctcagttccccccgtagcacttcttggagtttggtgcttccggtgtttagaagagagttgaagtcggcgatcgcattctggtttgatcgcaagtttgttgtgttaaggtcgaccagcgccttttcaacacgtttcatcgcccctaggtagtgggtgaggccggagctctgtggtctgggagacgatcagcaaaagactcagactatatgctcaaagagattagaagacacataccctgcgcgaatgattccatcttctcggttctttgcatcgagaggctggcgcaggcgatcgatggcgtcgttgaccttgtcgatattactgttggtgatttgaagggattgggtgttgctatagatgggaccaatggcttctttgacaacttttcctcctgtctccaggcgtaccatggagccttgtatcttcttcgtgagtcggttgagcttctcgaggttggcatataggacctcgacctccgcgctctcctccgcgtaggcggtattccttggcgccaccatggttaattggaaaattaggcaaaatcaatccagagagaccatatcacatgtcaccaggacccctcatgtccttcgcgggcaaacggaattgatcgatcaaatggactgattgtccctccagctccatccagtccagtgataaggagctccgccacgctagtccaaaagaagtcaggcccagtccggccttgtcacgtgaatccacgacgtcatcaacccagggcttgttcacaggtagcttgcaagaaaaggcaggcggggcttttgcagtccttcaatggaccccctggatgcagcaggtctcgtactttgccctaaccttcccgttcacaatgggcactgcaaggaccactcgtctgtggacggtgccccctgctgccctagctgcatacactgcgggggaatggtctcaacccagacaatcaagagctcaatatactacttctcgaacacgatacagcaatgattcagagtctggaaagtccaatgcaggcaaagacgatggatccatctggaacaacatcagccagaagctagatgaggttaagcaaaccgttggctccgccgagtgggcggatgtggggaacatcacagactatatcatcccagattggacgcgatttctaccagctactgccaaaaagctccagcgggagctctccctatctcccggctcattggcagacgatatttggagggaggcacaggaccctgatatcaaccctgagattctccgcgacgccaaggtacgagtaagtgaggatctttgcaacgaagagcaggcatttagacggcaacgacaacggaaggttgtcaaagcattgtcatcttacctcaaaatacccgtggaggacatccaccccgaagacgtaccggtcattgcggtgtgtggctcgggaggtggtctgcgcgctctagttgcaggcaccggatcgtatctggcagcacaggaagcaggtctgtgggactgcatcacctacacggctggtgtcagtggcagctgctggctgcaaaccctctatcattcgtccattgcgcagcaagacttcgacaagcttgtcgaccatttgaagaatcgtcttggtgttcacattgcattcccgccggcagctctcaatctcctcactactgcgccgacaaacaagtaccttctcagtgggtttgtggaaaagctgaaaggcgatcctggtgcggactttggactggtagatatttacggattgctgcttgcagcgagactattggtcccgcgaggagaactgggagtctccggttttgatttcaagttgtcgaaccaacgagccaatttgataaatggggctcatccgcttccaatttacacggcggtgagacatgagattcccgtcgaagccctcatacaaaaagatcagaccaagaagaatccaacgcctgaacagttggcgaaagagtcgcgacatgaagcatggttccagtggtttgagttcactccctacgaattcttttgtgaagaactgaatgccggaatccccacctggtctttggggcgtcacttcaacgcaggccgctctgatgtttccgctgacaatctccccatcccggagttaaggattcccgggctcatgggtgtttggggtagcgctttctgtgcgactttgtctcactattacaaggagatccggcctctggtcagcggcctggctggatttagtggaattgattctctcatccaaggcaagaaccaagacttgatcaaggtgcatcccatagaccctgcggctatacccaactatgttatgggcatgaaagatcagctgcccgactcctgtccggagtcaatcttccgagacgagcacctgcgtctcatggatgcgggaatgagtaataacctgccaatctacccactcatccgacctgggcgcgatgtcgatgtaattgtcgcatttgatgcgtctgcggatgtcaaacaggagaactggctctctgtggtcgatggatacgccaaacaacgtggtataaaaggttggcctgtcggcgccggatggcccaaacattcgagcctcaaggataccgagaaagcactgcgcgagccaaataacatcaccgaggggcaattgacagataaactcgccgacgctatggatacctctgaacccccacccgatgatcaagagcccaaggccggcacagacctgggctattgcaacgtttgggtcggcaccacagccgagcgaacctcgaacgacgagcctccgccatccaaacgcctatttgattcttcctacaacgaaaccccctccgaatccgagttccacctgatgcgcccagatgccggcatcgcggttgtctacttccctctgattcccaatccttccgcaccggatattcctcccaaacctaaaactcgtccgcgcgcagctgctcagtccatgcgacaggatagctctcaaaccagagatccggaactgcctcttgctccacagcccaactcgatcgacccggaagttgatgatttcctgtctacttggaacttcatctatacgcctgagcagattgattctgtcgttggccttgcaaaggcaaacttcttggagggtgaagagcagactcgtcgtgttatccatgctgtctatgagcgcaagaaatccgatcgcctgcggaaggaggcggcagagcatcggaagaagatggaaggctttgtgcctctatgattctcccgtcaacttccaccggacaaaacacgactttggtcgaagctgcatttaatactacattgttgtaaatatagacgacactttttgacatttttacctcgcatacccatggcctttcctttcattttcattttcagttggtttgagttagatagagcttgacctagacctttcatttatgtatatagtacagagcaaacgacctgtgacaatgatgaagcatagaagagatccaatggtacattcataaatgcactatgcactatgtattacttatgcacttgtacaagttctagctaataatttcagagctctgatcggttttatcctgttgcagcaccattcttctcaaaattcgtcttcactccctcaagctcttcactatgcacgctcttgattttggccttccggccctcatcagtagtcatctcatcgtcactcccagcaagactaacatcctgactgtcacccgtctgcttccgcagtccaagttccttctctagcgtatgtcccagcttcttagtcttgtccgagatacttgtagcagtacttttctgcgacgaagtctcagaaggaggctggttctccttcttatccccgtgcggcattccgcgccagtcagccggctcgcgttcatggatggaatcaccaggtttgggctcgctgatcgctaccggcgcgctatcttcggtctttttccctttcccttcgctcttgatagctgcgctggcttccaccgtctccgtcgcgggataccgccatacaactttcagcttgtctaacgcccggatccccttcctcgcactccccttgatcccatccatcgcctcccattctgtctcgaagacgcccgagtcgtgttcggcgccgccttcgaaatatgggttgaaccatacgtgtgcgatggaggttaccatagcgaagccggtataggatgctttgctgcgacgctcgaagtcgatattcacatccgagctagggacaatgagtggcttgtggggtttgtagagaattgctgagatactgtggtcctgcgacgataagccggagatatcagatcccgataccgtcggggacgaagtcgcaggcgagggaattggattcttgatcctggagtccgagttaggatctggcttggtagcctcttgttcctcagacgtcgagcccccgtcttcaacgacggtacgctcgttccgatggaacagatgaaaacacttaatcttcttccccccgtccacatagccctccacggcaaccttaaccccatctttcaagccccatatatgcacctccaggatctccaccggccgctcgacatactgcttccccagctcattcgcccacttatcgacatacccgacataccgcagctggctggggatgctaacgccgctcccgaaaccgacccgcatgcgtcgatccgtaaaccgctgcagcgcgtcttccttcttccacccttcctgactaatcagatatgcacacgcgatcgtcccgctacgccctttgcctgctttgcagtgcacgacggcgacccgttcgtttttgtctgtgtctggcgactccttgccctcgtctagccgctgtagccagttccgcatgcttcccattatgacggggacatacgcgaatggcggtgggtggtggtctggccaggggaagtggtggattcgtccgtagacttctgagtcggggtatcctgtaccttcggcgcggaactcccagatacaccattctttgccatgtttcgtgtcaaggaagttgactagtgcgtctagtgggttgcggtaggcgcgctttgggtatgttgatgatggaccggaggttgcgatgactgtggagtatgttaatgggtgtgtgtattttggtgtgggatcgataaggatgctaccattgtctgtcacgtaacagagatctagccctgcttctgggtggtgttgtcttggacctgcaactatctggcggagaattgatgactggcacattccaaggttagcagtgggacggttactgagctcgagctggcataccattgacagagtgtataggtgtttataatttgtatattccaccagaaatatgtggtagaaaagataatatccaaatcaaaacaagcacggggagttctgttattttcgcggatgatgtcatccggtgaattaagccctcttggctacaggtaatctactaactatattcgaccccggacctttatacaacaaatactactgtaacaactatattgcagcaagaaatttaattcctttgtacaccgtagagtcatagactaaatacacaaaatatttccatcagaaaatccagaaatttctaattgagccacatgtcgcgtgcccatccaagaccaattgagaccatccatccattacattagaaaaaaacagccaaatccacgcaataaaaagcatcacaggtccagactagtagcaacttatgcaatgccatactcctgagtaggcttcataacaaactgaatcgggttgtggtcagggacggtaacattcttcgcgccgtgctggtaccaagtcgcgagggtattgtcactgagctgggatttccaggtgtgagtgacatcgacattccagaccgggttttcagcaggagaaacaatggtcgtgatgttcttgtcgtcgcagaggacccgctcgtctgtgacgccgctgcagttggtgcggaacttgggggtcattgtgttctcgcggccgacaatgtcgtatctgtagacacagccgcctggggagcagcctatggtgaagttggatacgccccagatgatgtcgtcggtgatggtcttagtctgtaggctggcggggcgtgcactggctaggccggcgagcacgattgggaggatggtggtaagttgcattttagattatgaaattgaattgtttttggtagagaagagtaggataaataaataaacaattgagtggtaattgggtggttgaatagatgaaataataaggaggaggtgggaattatatacttaagaggcggcaggcgtttacccttccctgacggccgcccttggcactcggaaactcacgccgatcactttcaggggaatgtggtgaatgacctcccaatattcgatacaagagaactcgcttggtttctagaaagccttcgagccatcgaatcaatcgcttgacgttcataaagggtttattgtccgacaagttaccccatgatcgtcatcgaagtctttcagcctgactatttatagtacatggatccacagggaacagggttcatatcaaggcgccaggtgtttgcttcttgtgaagatgatttgagaacagaacagggcagtaaaattggctatgatgctggggcaaagttgtgggtaatacaagtgcgaagagaggatatatacatactgaccgaagtcaaaaattgtgtgacatgcccaagggataattggtggtcttgaggaattgtgtggcgtgtattagctgcagattcgaggcaacatgccgtcaaggaaatgattattctgatcgattgccctcgagggacaaaggattccaccagttgcacagttgcatgtttcactagggcttggcagagccattgtcggtgccactggcttcccactcatcccagccctcctctctcatgttttgctcaatggctagacgacggcgtttcttctttcgacgctctttgttataatcacgtcgctgctcgtccgacatgctcagccgacgaaccgctggcggtacagggtgccaaccggctttctcgttcgcttctttttccctctgtttctgctgtagctcctcatctagcttcttcacatcgtcccgaatgagagggtgatattgcagtcgcatcgcaaactcgtccacagaccccgcacagatctcacggatttccgcctgcgtttcagggctgagactggcgtcccgcttgatcaggtcctggaagtacataaaaccggaccggaaattccctgcatccaaacacatcaggatgatagactcgaatgtaacaccgttcggtaccactccaagtgatgccatctctttcaccaggaacatgcccgattcgcggttgcgggccgttcggcacatccgaattagcgcgttgtaaactcggacgtcggcgccttccgggcataatgtataaagctctttgtagaacccaacaccgtcgtccaccacagatggatcatcatgggcatcatgttcacagagatccgcgatgacacgtacagagccgatgggaatggttcgtttcgcattcttcaaccgcttgagaatctgccacgcctcccgacgatcaactttactctgtatcatatgcgcaagaacacgctccgtcgagctatctgttaggggaatatgagcttcgtgcatggtgcaaagcgcttcgaacgcagcaggcagattgcccgctgtcacgtgcgtctcgacaagtctttcatactgtgtgcgctcgagcgggatcccactctcaccgaggtaacggaacacagagctcgccatctccgtatcaccagcatttgcagccattttcaatacgtcatcgcagacttcaatgagcggatgcatgtagcccagctctaccatccgtcgccacacgtagtgtgccatggggtaatggccgtgcttccctgcctcggtcaacacgtgcatccaaagccgatgggtcatgtcgtggccctggtcgacgcgcgcacgcatcacatcgtacacttcatccagctctccgtggtcgcaaagcgtgtagacaattatactgtgtagccagttttccacaaatatatccttgcgctgcatcaatgcaacgtgctcgagcgcgagctcgatctggttctcgcggagaagaccagccgccacaaaatgccatccggctgggctcagcgtgagccatcggtcgcggagcttgttgaggatttcttgtcgtaggaggtagtccggatgtacagctaggacctgtattggaattgcatcgttagtttcgctgcatatgtagctcgcttcaaccagataacctacctgcaatgcaccgtggagtgtcccagagtctgcggtgatgccattattctccatttcctccagcagacctcgcacaagctccggcgagcccctctcattatcggtatttgcaagaatcagcgccttgtagtggcgagcattcggcttgacatggcggtcccgaatgagaagtcgtaggatctgcgttatgtgtcgaatgttcggcttgttgtccattgcatattgtaatcgcgactcgagcccttcgttcgttttacctagaaggtcgtcttgcaccttatgtgttcgtgtgtatagcgggctctttcgtcgtggatgtggcctggcgtatgttggatctggagataggcgagtgtcacggaattcattctcacgtggctcccgtgtttcgctccaatcattatgatgtgctgcattatatgagaatttggaatcatcgccgcctgaggtgttgtagcatcggcgcgaacctgagctcgggctaggaatcgaaggtagtgggtatagcgggtttcgacccttggatttggggaatgccgttgaacgactgagactcagagctgtaaatgacggacaaagcgagtaccacagcccatcgaggaccaacgcccgccgcgacatatccgcttgtggctaactgatcggaagcttagcctccgcggatttgatctggagtttgatatcacgtgacatcctcgaatattcgcttcttggattgcgcgggatttacaatgaaataggtaagtcaggtttgggtttttggaacataaaatttagaggtagttgtaaatcgaccaagtgacccagatgccgtgaaaatacagagccagatacgccacggccatgctcgatcaaaccgttccaccacacctttcgagcgacctcaccaccgtctcctccgggggtatctcgtttgccgtcttcttaaaatcattgatgcagaacacacttatgtctaattggggccgcctcgtccccgaccacgtccaccgcggccgccaccaccaccccgaccacggccgcggccacgatcaccatctcgcccgtgaccgccgcgacggccttgtggttggttctgttgctgctctttaacaatttcgacaatctcttcgggaactcgtaggtatttgatctggtggattgttagcgtatagcctaaggagcggggctctgcgttgattgcgtgtcggagggcttacgttgttgccccggatgtagacttcgggtaatctgaagaagcggtcgccctcaggactcgtctgcactacctcgcgcagaatcaggttcatgaagttgtcgcacgtaaccaggtggccgttcagagtttcgccgttcttgagctccacgagcatggggtggccctgtgcggccgtgaggagaccgagaggcagctgatcataaactgacttagtataggtgtcggaaaaggcgtttgggtaaagctggagcttaccattttgaaatacgatcgaggtgggtgaaggtgggagagttagttggcgcacagagttgaaagagcgcgggttgttgcgtgtgtccaaagtttgtagcttatggattgaacggaggaattagacccggcactgttgatttatctggtgatgttgacagtagcaatggattcaagctctaagagatgcgatgaggaagccggaaaaagggaagtgccgagcccaaatgtggcttgggtgccatctactacgaggaaccttcgaattctttatattcttctatttacgtccattatataccaaaagcatagatctacagtttgacaactttcggtaacataaattagggggtatcgactagaattgagcttttgaggttgcacacctattggagagaagattaatccgttgacttcgaaaacatcctcgtgtgcattacatagtgcataagagaactgagcaccgcaaggcttaaacctttggtcgcttagctagctgtgtcccgtcctcctcctcgtcgtcatcatcatccataactgtgagcttgcgcttgacacgccggtctcggctaccggtaggagccttgctaacttgtttgtttgcctcttcctcttcatcctcaccttctggcaagcggccctcgagcgcatccaatgtgatctcgtaaccctcctccacattttggaccgtagcatcaagtttctccactcggtctagaagctccagttcgttcaaaagttctttgttctttttatagagacgttgcttggttagcatacgccaccaatagtagcgtcggtcatcctcattttcggccttgtacttcttgattaacagtcgggcaaggttagtgccaccggccaggcggtggctttgaggaatctgaccgagaagatacatctctagaacgtgtgcgaactgcgtaggttcgatcttgaacgatctgcggatgtcatgtagaagcttggtagggatgagggcggaagtaggcacattgcgagggcgtttcttttgagaatacgccccaaggggatcggggttgagattcacgttgtgcctcaggaactccggccgcagcagacaataatcggctgtatcccggagagcgtcgaactgttcattggggtcttcgatggtcaattctagaatggtcggatctgcgatgcaggccgcgtggattgtggtatataggtgtgtgccgtggccggcgcggtggtgtggagggagaataaggaactgggcaatgcggagtcgtgcaggaagcttggcgatattgacttctggtaacgggaacacttcgttcttgaccgcgggcgtttgtgattgatctcgctggtaataccaatagcggtacgttgtggcatatccgacaatcgaatacgatgatgctgttgctgttggaggagtcactttctcatatctgtaaatcggattagcctcaggtcacagatatcagcacaagacaaacatacacgaaatataccctccaccggtcgagcgtccactcggggtcgtctgtctctaagggagttccagcttcgatgaagagggagacgagaacctgcatgcgatccagaattttccgcacttcagggtctgcaagtgatccagcccagacctcatattttcggtcctcaacctcgtagctaatgacaaactcgcccggaggcttgaagtctttcgcatcagggtcgttttgaacagctttctcatagtcttggagatcggcgaacgcctctgcgcaaaatgtggttagcttatatcgcgcccgctgtcgcacaggccaaactcaccttcttgaacaaagggtttcaaagtatcgagaagatcaacagcagctgtgtcaccgacggacttgaacttctcgtcgtaagaaatatgaacatgagggcgcaaatcatgggcggcgaagcgcaagcggataatcaagcccctgtagccgaatatttgctcatcgtcgccaaagataggataggtaaattgggggtggaaggttgaaagtgttttcggcttcttctcgccgggttgaatgatcgtgacgtgaaccgcatcgttggcgtcgcaagaccctaaagtgaatcctaatcagcttatatcttggcagcattagatagcgggagactatgaactcacatccagcttcgctcgccattttgacaggatatgtggagtttgaatgtcaaaagagacgatgaaggatctgaggtctaaagagagacgcgaataacgcgccccggcccaggcgcgcatcagtattacctaatctggatctatggcccgcctagctctagacggtaataaaccttgaccagtcactactattccgtacgccgtaataaggattgaatatctcattaacagactgtctaaggaaaaggctctatggctccagctttacgcacaaattttggaagcctctgattccggactattcacaagtataagactcggacaagacaagtgagaaaatatatcagggaggtcaataccactatttacaattcaggaagctgcgagtactcggatagtaacagaaaagaaccttccaaggaaggggctaagttggaacactatccagcttcattctcggtgatgatatagacgctagttgccaccactagacatcggcaaagcccacccggcccatagcccagcccagccccacccccccaaaggccgggggtttgggtgaactnnnnnnnnnnnnnnnnnnnnnnnnnnnnnnnnnnnnnnnnnnnnnnnnnnnnnnnnnnnnnnnnnnnnnnnnnnnnnnnnnnnnnnnnnnnnnnnnnnnnnnnnnnnnnnnnnnnnnnnnnnnnnnnnnnnnnnnnnnnnnnnnnnnnnnnnnnnnnnnnnnnnnnnnnnnnnnnnnnnnnnnnnnnnnnnnnnnnnnnnnnnnnnnnnnnnnnnnnnnnnnnnnnnnnnnnnnnnnnnnnnnnnnnnnnnnnnnnnnnnnnnnnnnnnnnnnnnnnnnnnnnnnnnnnnnnnnnnnnnnnnnnnnnnnnnnnnnnnnnnnnnnnnnnnnnnnnnnnnnnnnnnnnnnnnnnnnnnnnnnnnnnnnnnnnnnnnnnnnnnnnnnnnnnnnnnnnnnnnnnnnnnnnnnnnnnnnnnnnnnnnnnnnnnnnnnnnnnnnnnnnnnnnnnnnnnnnnnnnnnnnnnnnnnnnnnnnnnnnnnnnnnnnnnnnnnnnnnnnnnnnnnnnnnnnnnnnnnnnnnnnnnnnnnnnnnnnnnnnnnnnnnnnnnnnnnnnnnnnnnnnnnnnnnnnnnnnnnnnnnnnnnnnnnnnnnnnnnnnnnnnnnnnnnnnnnnnnnnnnnnnnnnnnnnnnnnnnnnnnnnnnnnnnnnnnnnnnnnnnnnnnnnnnnnnnnnnnnnnnnnnnnnnnnnnnnnnnnnnnnnnnnnnnnnnnnnnnnnnnnnnnnnnnnnnnnnnnnnnnnnnnnnnnnnnnnnnnnnnnnnnnnnnttgtacagagatcagacgaattggtaaggtgatctgggaatagcttcatttttaatatttatggatagatcattttttttagtatttgtgcgtagattagataaactagtcaggtgatctaggaatagcatcatttttggcatttatagatagatagattagatgaattggtaaggtaatcatgttttttaccagactaaaacaagtgataaaaacctataatttattaatcttatataatctgacttataagcgccaagacctatataaaatacaaaaatgggctaaaataggcccattatgggtttatgggcttagcccactgggctatgggctgggctgggcctaggggagctgggcccatagcccatgtgggttgggctatgggctgaaatcttgggcccatgctgggctttgccgatgtctagccaccactacacctaatagacccgaaggttcaatagttattgtctagcatctatatcttgctgtaccttatctagcttgccaaaacattcccgaacacatcttggcgacgaatattaaagatgatatctagagtgaagttcgcaggctgtctttcttttaactttcattcatatcatgtattctattccatcgcttctgatctagtttccatttccaagctgatttcttcagttggggtatcatttccaaagctcgccggatccccgtcgtacgtcctattcgctccagcgcttcaacaacccaatcatgaacttcgtcaggaatccccgctgcgctcccggcaattcctagtggaaaaagtagcatgaatgtaccatttaacagtggtatatctgacgggtcttcattgactccttgctcgaagatagcttcctgacttgcagttccggcgcatatgtcacctgccatgcaagaaatcgtgtccaatgcttgctgccgttgaattacatcgtctgctgtgggtcgtgccattttcgaaatttgggatacgatggtctcgttgaccagtaatcgtgcccagcggtagtggttgaaaactctcgcaacccacatgttcgcgtagacatgatactggccacgaaaggtgtgctcgtatgtgttgggttcttttatagcgaaggaccagtggatcgggaggtgagtttcccactcgcggagttcatcttcaaataatagggctgagttcactactgctctggaaccgggcttttggtgatgcacatgtgcatcgaacttcgtatatcttatcagtatgtcaactaggtcgacatctggtaagatatccggtggcgcagatggtatgagatcaggagaccaattcagtagatctggggtgacaaccctcttggagaaatacttgacaattgagacaaagtagaattgtaagtgagctcgatggttcaagttggtaagtgatgaccgaaagatggattgtttaagtaacgcggccgcaccattcatatgcactatccaagagttgagctggtttggggtacagctgaccatctgcgcgggtcagtttgaattataaaaaagcaattagaaacgaaatgcatacctcgtacagactcagcattacgatcaagtggagtgttctgtcgggattggcctgagtggggttctccactacttctcgtacagccttgatgaccgtaacatgtttctctcgagataatatccgcagttctctgtcattattgacattggacaaggcagcaaggccgaccgagacgatagcatctcgactcgactgatcgagagtaatggccccaacttcaggagatggcttcacagtacctatctgtaaagagccatcttctttggtgacaattcttgtcacaaaacggttaataaagaacctcagcccctgatcctccaatgggatggacagcggggcagcaattctcggagtccgaatcaattggctcctgctcctgcagactaatgcatctgacggagaacagtcgggtcgcgagccgggggtgggtatatcatattctagggcactatcctccaatcttcgacgggcctcggtcttagcttttgcctctgcacttcgtcgagcggccttgtcattctcatcccggaacattgaagacggcacatcccgatagccgccacatggcttgcctgctctcctgcattgggaacacaggggctcaagccggtcacactagaccatgtcagtctacaattgggctggtgttaggccacgccacttgcctttatccgtctttcccgacaactgccgcaacatttactgggacgaccatagaacggcattgtctcttagtggatgcgggtggtcgtattcaattctaaataggcaaagaattcgtgagatcagcccgtgaacatgagtcgatgaccggggggcttggaggcttggactccactatttagtgggttcttggcatcgatcggcctttcctaattgggtatctgtttcatcctagtcaaacatatgtacagtctacaacaaagtatgtacacatcagatcttagttattgaatgtctttgattgtggctttatcattccatatttgcaattatatttgggcactcggctgttgcgcgagacagtctcgagacgatccctagatttagttcgacaaacattcgataaacataagaaaactagtatgaggggttcactagctaaaccaagaaatatacatggtaaaagtattcgaacagggtcagcggtcgaagaagcccttctagggcatctaaacgtagacctattgtacatggtaaacatgtgcctgacccttcacgtggtaatgatgtggctgatgatggtgatgagctttctgcgagctctcaagtggggcagtgggcaaatctgtcgatgtgctggctggaattgtactgcccacaaaagatggggaagtcctactgttggctgcaatagttgatgatgtagctgtttcggtgtccaaaacagcagagactgcaatagttgatgatgatgcaactgtttcgatgtccacgacagcagagacagcagcaaactccgtggtggttgagtatgaaacaatcgaactttgggtggatacgccagaagtcgtagtcgttgcgctaggagccaagctcaatgtagcggacgacgcacttggtgtgggattggccgtagatgaaacagctttggaggaggatgcagatacaacatcagactcatccatgtgatagagcaatgatccccagcccaacccgtcgtaatgaccagacccttctccccaggatcccgcaccaccctccgcaccgccgtaatattcaagagagttgttgaggtaaagagtggtccaaggtgcgtccaattgcttcagcacgacatagtggttgtagagaagctcccaggtaggtctgatggctccacgggaggcattactgatctcggtgtagctgactataccgttcgtgtaggggacgaagggaacgtcgtttccaaggttgtatcgcgcaaagtactccgttctagggcgaatattagtaattgctaaggcggaaaccttgggatgattggatggtacttacccacggagaatccggctatcgttataggcaaacaaatcctctccttggttcaaggcctgctgcccgataacacctagaagctgtatgtctaacgctgagtggccctgatcacgaccggattcttggccttggccgagtaaagttccagtactaggttcttcaacgatattggtgatagcattgttgatggcacccgttccatccccgttcttgaagtaattcacagcgaaatcccatactgtttgattgtcggttatgacagccatagccatcgccgaagcgacattgcacaactcccagttggcgaagaaatgaagaatattatgctccgacgactcttcatggttcagccaggtgtagtgcatcgggataaagatgttattggccatttccacgacagatgggaggacatcatccacgaagggctgatagtcaagaaggagttcggctgcgttggcgagttcatacccctgcaggccagctgtgaggtacttgtcgtcgccaccaccgattgcagtgagattggtcgcccatgcatgcaggatattgctagcggcatcggcaaagctcgtgttcccggatatcttccagcgtaagcctagattgaaagctgccgcgacgtcatgccagaggagctgtgcgtttgcggcattgtcttcccaggcactccgatagacaacgctgactgctgaaggagtgtagctggcgtccgaaaatgagaggcttgtcaaggtattccaagatgtagtccatggatccagactggcattgatctttttctgggtgcgagagatatcgctttcagagacgaggaggccagggtgcacaaaacttgctacaagggggagaaaggggataacgaaagaaagagaggggaccattgcaaagagaaaggcagcaatgagtacaaatatggcaagaaaaagaatgaaggacaaaactaaagatatgaggaaccagcctagtaatatagagatcgttattctctggttagattaaactacaaataaagcagagatatattcgaggtctatgaaattactccgttcttaatttaaaacagcctgtgtttcagctatgcgctaggaaaattggaattccggacagtttcatgtttctaggtgtttgtagacattagctccggtacctgtcgatcaagtactccgtagttgtcctgacatcggaaatgaggttatattcggctaggaaattcgtgggatctattcgacaagaaacagccaagatattctcatagtacctgaatttattatggcatgcgtactcggtctatgcttccctccttaacgatgtagcacttcaataatgtcttcacgatggtatacggggtaccatatggtagataactccgatgtcttttttggatggtcttcctagatatctctttagacgtctttttacacttgtttgcttctcttcttggtattatagctagaagaatggtcattgactatatcactctacaataggggtaaacgcataaaccctgtgtataaccagagatcttttctacaactcaacggaaattgttccagaacagcttccagtggtatcgtttggggttatcctgtttcttctaagagacatcatccatatgggacccgtgttccccgagagaaaaagcaggtggaagttcatgagttaggcccaagagctgcgtttctgatatgccaggctaagctgctgaggtcggctacatgccatgttacttcgcagagactagctctactaaaagtcaatttcgtatacaacagcacaccgatatctggccgaggtaccgtttccattgcatcaacagctattttcatgaagtatattgccaaaaaaagatattgaattacgaacgtgtccggttatatgacttttcgaggtcttaagacatctccctagagagttgagagtgaaaaaagaggaatagtgaaacgggcgaatgctatagcctacagttacggttgagtggcctaacacttaccagctaccttaattaagagatgcctaaccctatttttcccctcccggcagtggatatcgttgctgctgtattgtatgccattgttttcttattgacagctatacaatggatttgatgtaggcctgggtctgaagcgttccagcttggcggtgtagtgatgatctctttggtcgatatcacagaaaagacgctgaacacgggaaaacggtatccaagtaggtatcattatccagctagtagcatctagcttgttcgcagtagcgcctgggcgtttcagtttcaatttcacttccaagcgcttcacagggtctctaggttcgatctgtctctcgtcgacttcaccgaagccacgacaggatatttgggcacccaggggggctgccgtatgtatttgataccctgtatacctgtccatgtgttgccctttccgtctgccggcatccaggaaggtatctgccatacttgggctttcgactcccaaagggtccacacggtagcggtgacccggagattcggatgcgataagaatggcggggtcgatcggctttgggtctgtggtctgtgatctctgcatatgtattctagtggagcatgggtgactgctgtgttcttgcatcagtatggagtatcaatgtgcaagcgtggccgacagtggcttgcgtagctttcgtggcttgaacatttcatattaaatcatggatcgatgttctttgctatagacatagcaggggtaaagtgaagtaatctagacaaggtaaggaggaataaatgcagaaagaatcgatccaagcaaggatggttgcaccaaggccagatgtgtggctggagaacatacaacatgttctagaataaaccttccaaggacaagccctatatgcatgcctttcaagggcattgtcgaataaaaatatcccttctaaatacgcatatgttgctcgtaccttgtacatatttccccctggtatgttttgaaagcggtacctgagctacgtgggtcccccgggtccttccaacaccttggcctcttacgccttacgcaaccacacatctccagactccctctggaccctctattcaattcccctcaccatgatagaaagtctatagagtgaactgcgagatcatcatggagggactattcactctgctcgccctgagcattgtgatggcaattacgtgagctacctgtgttcggaaacctaagattcacttggaagctaatgctcatgattggcagatcctttgtcgtcggctcattacctctggcttttacactgtccccctctcaactccgcttgatatcatcgattggtatgggcgttctggtggggacgtcactgatcgtgattatccccgagggcattgaaactctctacagcgcgaacgctctcactcgcaaacaacacagtccacgggctaccgctattgaatggcagcaccaggccccggtcgtggcagccacgtttggcccgaacggagacagcgcctcaaccctaccgtccgatacccctgtcccgggtcttcttctggaaagagaccaactctccgagtcgcaaacacttcatgtccgtaaggaggattcggatgaaacaacggccaaggacacaatccacggagacgaggagagttcgccacatgcgtgggtcggaatcgcccttgtcagtggttttattttgatgtacctcgtcgataaattgcccgaattcgcagcgccgacaaaaaacgatcggaccccttaccatatctctttggataaccttggatctgggttgcggcggggttcctccccctcccgcgatggtggactgcttgatgcgaaccacgcgtccagacgtggccacagctttgcgaccacgaccggcctagtgatccacgccgcggcggacggtattgctctaggcgcttccagctcggatgccgggctcagtttcattatattcttggcgatcatggtgcataaagctccagcgtctttcggattaacatccatcctgctcaagcaagggctgtcaagtcgcaccgcgagagcgcatttgctggtcttcagtctggcagctcctttcggtgccttggctactttcctctttgtacagatgatgggatcttccggtgccgatgaggcaggcactcactggcgcactggaatgctactgcttttctctgggggtacctttttgtgagtcttcttttctcggtcagaaccatagacctttatattaacccctgcaggtatgttgcgatgcacaccatgcaagaaaacggcccgggctcatccccgcgcgaacttcctatcaacggatatggtgaccgagaccagaatggatcagacaagtccatgagagacttgattgcatctgttttgggcatgatcttgccactattcttgcaaattggacatgctcattgagcaagtgcccgtatgtattccttggggatacgccatagtgcttttacattttcgctcttcaactagattttggagggcttatacccattgcaaggtacatttgggagatgggttattctagctgagataaattgagatacgggaggatatgtttgaatagatttccttgtataactgctgggtgctatatcggtcataattgcatgatatctcacgatcacatctacgtagcgtcactgtgccatatttaaagcatgacaaggtccccgacgtctgacttctccgaagaatactttttatcttcccatgatgtcggtgatgacaagattcgtcagtttcgtcagtctgaatcatcccggcgttcttgacaggttccacggtcccattccgatagccgcatgccaatccacagccttgggtcaatatcctcgtgggtgttaatgggtatcgtgagtgtcgtgaatattcaggttgccttgacagttcacgagattcagccccggagatctatgacttggtcttgggccaaagcacctgcgtgtctacattctcgacgcctcacttttgcctcttttgtcataaatccctaaaaggcaaatctcaggcaaatcagaaggcaaaaagatgcagaggaaacatacgatcagtgtcggacacataagatccatataaatcccatctgctgaactagtgccggcgaggccatgctttgtcagaatcacgacacctccgcttcaactgtcccctttcctcgtcgcctgctttttcattggaagtcgatttcggactttgattgaatgaaaaagaaacgacaaaaaaaagtgatatattcgaaaaaaagaaaaaaaagaaaaagaaaaacggggggcctcgatacattcggaggattattagtctcacctcccttcttccctcggccgttcgccagcctctcctcataaccccgaacatcatactcttgactcccgactcgctcataattgtatgccggccctgaacgctagaaggctcagtgcgttgcatcaataaatacaaatcggacaagtgggaggatcatcctagactgtggcggcctcccccctgttctgcggccatggactcccatcgggcatcattcagcgacatgggagatgggtcgaatgcgcacacaacagatccgttggaccctcatagccaaccgtcccacgaatcagtcaatactttcgccagtactccatccagatcactcagcaccaagagcaccgtcactcctatacccgccaacctacttccttcagcgcccgcatcacccccgacacccgcgcccagccctaccccccatcaacgaccaccaacttggcacacgaccgatgacgaagagactagctttttgttaagccttcgcattcacttcagtactctatccaacggtcgaaaacagaaactcctggagggccttttggacatatgcgacagccagcatctgagctttgtgtcgagttatgttggacctcgattgaggaaagacccatttcaggttttccctaatgagctatgcttaagagtgagccgtttggtcgagttctcttcttatacagtactaatgttgcgtctgcttaggttctctcctttatcgacgatcccaagactcttgcccgagcctcacaagtatcacggcgttggcgagaactactaaacgatgacattacttggaaaaacctatgcgagaaacatgcgtactcggtgcgacgggtactggacgatgaggcggacctcgtcgacccattcaccgcccaccccgtagacccggtttctggctcacgcaccttccacggcctgcagcggcgcttgaccgcatccagtggtcaggccacggagagtgcaccggagctaccccgcacgctttctggagaatggttgcctccgacaagcttctctcgaagacgtcggacccgacctgtctcctaccgttcacagttcaaacaaaaatacatggtcgagtccgcgtggaacaaaggtggtcgatgcacccagcgccatatcactcctgaccaaggtgtagtgacaagtcttcacctcactccgaagtatattgtcgtcgcgttggataatgcgaagatccacgtatatgataccaacggtgacaatcaaaagacccttcaaggtcatgtgatgggagtatgggcaatggttccgtgggatgatattttggtcagtggaggctgcgatcgggaagttcgagtatggaacatggctactgggtaagacagaacatccacggcttgcacgaacaaaaactaacacatgatagcgcggggatccatcttcttcgaggccacacatcaaccgtgcgttgtctaaaaatgtcagatcggaacaccgccatctcaggatccagagacaccaccctccgtatttgggatctggctacagggacatgtcgtaacgtcctcgttggacaccaagccagtgtaaggtgcctggccatccatggtgatctagtcgtgtcaggcagttatgatacgactgcacgtatatggagcatctctcaaggccgctgtctccgcaccctttcaggacatttcagtcagatctacgctattgcctttgacggccggcggatcgcgacaggaagtttggatactagcgtccggatttgggacccgcattctgggcagtgccacgccattttacaaggtcatacgtctttggttggtcagctacagatgcgggacgacaccctagtgacaggtggctcggatggctctgtccgcgtttggtcgttgactaagatggcgccgattcaccgtcttgcggcccacgataacagtgtcaccagtcttcagtttgataagactcgcattgttagtggtggcagcgatggccgtgtcaaggtttggaacctacagactggtcagctattgcgggagctttctactccggccgaggcggtttggagggttgcttttgaagatgaaaaggcagtaatcatggccagccgatctgggcgcactgttatggaggtatgtggcgatgttctgtcttatgagaatatgttttctaatatatatcgcaggtctggtctttctctccaccacccgatgatttcgatgatacagccagtgagagtggtttaatcactacaggcacaagctctgttaatgaccgcgatctggttccaactcgacgtcgaaccctctgctccgtccccgcatcgatcccgttaggcactgatagcgatgcacttatgccagacgcgccctcctaatcccttagcatttgctggtctgaacagatccaaatgcgttttgatatcctgccatctaacgactacgcatatctatttatttgtcatgtttctctccccatcttttgaagcgcggtgtgtttttttcaacagtgggtgttttgccttcagaatgaactactggcgtccctccctatgtgtttctagagcaccaaacggttgcatatttggtgtcacaaatctgtttggttactgtgccttgttctttatccagactgatgaagttgccatattggagttgtgaggcctttcttttacattgttcttatttcatatcggccatttcggagtgttttctggttgagtacatgataccttttggggaacacttggaatgtgatttatataccatctagtccgatgaaatctatcatttacattcctactctttcatctcgcccaagtttgaagctcaaatgtccaaatgtccaactcgtggcctagacctagaatgactaagcgggtctctggctcaccccgttcggggaatgtcccagcatcatcttctagaccttaacgcgagcattggttactgaaatacagaactctgctttagaaaggccattcgtacatcctttaagatgtgtatgtgcttcgctttgactaggcagccgagttgatctagttaccaccgatgacatacggccgtcctggacctttgtgaaacccagatctgagtccgacctgcctgtaactcgcagtcccctttgcgctttcgctcaaagtacccgcaagtcttggaggttccttagacgactgccggcgggtaaacaatggtctatgggggcaagccaagtaccggatgttacctgtgtcgcaagcggaagataaaggtatgttccgagcttcaatatttgtttttggatttaccccgccaatgaatctgtattgtgtctgtacttatctttcttctttgcatgcattgaaaggtcaaatgctaaattcctcccttcaagtgcgatgaagcacacccggagtgccggaactgcatcatctatggccggccatgtcctgggtaccggccggatgctgtctttcgcaacgagaccaggaaagtcgagcggctggtgaagagcaatgccggtgtaaattcccatagcaattccgacagccagaacggctccccaacggcggactcatctatgtcagctgtctcgcaccgccgacgcgcaaactcacatgccaaacaccatggcaaggctaccctgacgctatactcgcccgctgactccagctgggagcaacgagcactctgctacttcttcgaccagtacaccatcaaagctgatgccgatgatggcggacacctcgaatatctacccccgctgtacgcccgcgagctcggtcgccagagcagcgaatcgccgtctccttgtttgcggtgggcggttgatgccacggcgctgatgactctcgctaacgcgaagaatgccccacctctcatgaataaggcgcgggagggctatgggcgggctttgcggggcttgcaggaggcgttggcgtcgccggctaatgcggttaaggatgagacgtttgcttcggttgttttgctttcgctgtatgaggatatctcgggcgagcggaatgggctactcagctcgcatacggccgggtttgagttcttgatgaagctccgtggaaacacgctggttgatcatcagcgtggtcgagatatgcttacatttgcttatgcccacacggtaggtttgactctgacatcgggaccgtataaatatcggtccgagactgacgtttgtatagtatgttgaaatacttgcactgggagacaagccccggttcgacatcaaatgggacctcggcatgctcaacaccaatgacccagtcgagcggctcatgttcaccgtatcaaagctctgtcagttattcctatacataagatctccaccaaacctcccagaccaagcagcaatcgaatcatggatcagagccggcctcgagtacgacatcgaaatttcccaatggacacagaccctaccagaccgctggctcccactagtcgtctactcagcacagggcgagctcctactaacatacaaccgcctctccaacgtcgtgatctggaactactaccgcgcagtgcgcgtgatggtccagcatcttctcctcggcctaaacaccacacttatctccatcaaggcagcgaacaaacaattctccgattccccgaattccagttccggaccagagtccgaacccgttctcgacgagtcagctctaaaagccgtcatccgcgaaatgaccacagacgtctgtcgcagcatccccttcgcgctggctgacgtcgactccctcggccgcccgaataaatcagatagcgcgtggaaaatgcgcgccgcgcagggctacggcttgctctggcccctctggtatattctctcctctggtttgccgaccccggcacagggggagcagatccgcactgtgctgtcgcgtgtcgggtctacgcagggcattaaattggcgttggttcttgctcgtgaggcggagcgcatgcgtggagagcaggaggacgcgcagggtgaaattcttggttgggatttaccccgtggtgcgtacgatctcgataactaaacttgatgcgtgtgatttgagtgccgattgcgcgggatctgagagctatgctgtaccactatgacttgaaatgaaaaaaggctcttgggagaatttcagtcactgaatgctctgctaaacgcataacggcaccagaccagcaccagatcgtctgaatacggctgggtagacttggagccagtcgcatgttatacatggaaaagtcgttttacacattttagaccttttttcaccgcagatattttctatattctgcggctgttgattttcatatttctctataacactcgtacaaaaaaaaaacataaagatcctcccaaatctcttctggagaccaaatggatcagtttattcaacctcgtattattgtctagtactagtggcatctcagaatcaatataaacattagaactacgagtgtattcagtctacagaaaacacgttctcctcttccgactcttcgtcacccgactgcggcaaaaaccctttcctaagcagtgctgccttcatccgactgtaatcctccgtggcgcgagcgatgatggctgcaaggtcgttgtaggtatcaatggcatggcctttatccttcatacggtacacctcggggtcttcaagaggcgagttgtaccaggtcgtgttgaatgggagtcccccgttcttgagcttaggaggtgcgtccttagtggcgcccccactgggctttgcgggtccaggttctggcttgcgacgtttaggcgcgtccttggtggtcccccggctgacccttatgggaccaacatttgactttcggcgcttagcgggttgctcttcgtctatatcttgagtagcgggtgtcccgtttgagacggtgcttccgcgcacgcgtgaacttccaatggtaggttgatgtgtcgggggatgtacaatagacacttctacagctgcatgaggagattgttgtagttcacgctcagagggtacgtattcgtcatcaattttttcggggttcgggtgggccacaggtgcagggagatttcgactagtcgacttcgagagctccagggcgatagctatatcctttgcgctgtagtatgtgcaaagcaatggattcgagggctcgcgttcagccacggctgcgataacccacgcgggcacattcggagatacatcaggacctgttcgcacatcagtattatcgtacttcgtccacagtatagagtacaacgtacgaaatgaacattggtagggtcttcgaaaaaatacacaactagcacatgcccacatccattgtgcgttggtgttcgcgaaaactatccgacaatgcatgaattgacccttgccatgggcgcagcgcgtacatttgtgatccgctggggcttcgagaccacacaactgcccctgcgctgcacgccgatacaaagtagatatcaacggcctgggctggctatttttccaatctagttcggtccgctcggggtgcaaatcgcggattttccgttcggctgccgttagaaaattgcgtagcataggcaatccggcagtgtctaggcccgggtagtgagcttaacaaccctattagcgaatgcgcgtgcttgcagggccgaaaaagaatggatatagtgctcacggtcctcgacttgcgctttgatggtagcgtcgagctcggcggccgtacgggctcgaaccgacgggccagggtcttccttctgagcagcgggcttacgcgtcatcgtcgcgacatcagtcccatattcgccgttcgtctggtatggataatcagtcgcatcgtcgtcactactgtcagattcggaggcttgtaggggattggaagagattgttggtaagcatgctgtcttgaagtgcgattgaccctcgagagttgcgcttgaagcgaatctcgcgacccatagctatcgtctggactcgtagcagacgtgttgaaagggcttttgtttcctttttggtgaacagctcggaattgaaatcgtccagcacttctcagctctcacagttcaggaacttggaaggaacgtaaaaagagaccatatgatccccttctaatcccaaaaggtttagtttgtggttgagtatcaggtaactatgttgtacgtcattgaggctgaatgcgggtagacacctgataaacaaggtatctgtctcaactagataactataaccgcattgatccaggtagttaattcaagggctttatatcctcttactctcttgttttccgggatctccttgtagttgtagtcctcggggataagtataagaggcattcctctgtatcagctgtaagctcagataagcgaagctagggatctccggctaagtcggcttgttgtataccactgtagcaccggacttggccggatatcattgacgtcatttatataggaccatggcgaatgcccttgaatatcagttgatttgcagaatatgcagaaaatcaatcgaggtcaataaaagacagtaaatcaacaacagtgcacctggaggtgtatggagtagacgaagataccaaaaaaggaaaaaaactcgggaggtgcggagataagcacaggcccactgacgacatactccgtagtttcttccaaggtacaaagattggaagcattcggactttgcttcttacacctctcccctcttctttacagtatacaccatgaccacacaagaacgtaggcttccctttgggaagatcgagcccaattcgctcaagtactttgccagctgtgcactgggcggagtcatcggtatgtccaagctccccatcccaccaaggcacgcactaacaatattactctagcttgtggtaggtgacagctctccaatttgcaactaactcactcaattgacacccaattccatataggacctacccacacagctgtcacacctctcgacctcgtaaaatgccgtcgccaggttgatcccaagatctacacctccaacatccaagcatggaagactatcttctccaaagaaggcctccacggcgtcttcttcggttggtccccgaccttcctgggctactccatgcagggtgctggaaagtacggtctgtacgagtacttcaagtacatctacggaaaccagatgttcccgcatgccaaccccactttggtcttcctcggtgccagtgccactgctgaattctttgctgatatggccctgtgccctatggaagctatcaaggtccgcatgcagaccacgctgccacctttcgcctccagtatgcgcgagggctggggtaagatcgtcaccaaggagggttatgctggtttgtacaagggattgtaccctctgtgggccagacagatcccttataccatgaccaagtttgccaccttcgaggagactgtcaagctcatctaccgcaccatgggtaagcccaaggaagagtacagtcaattacagcagactggtgtcagcttcttgggtggttacattgctggaatcttctgtgctcttgttagccatccggcagatgtcatggtcagcaaattgaatgctgatcgtaaaggtgagttttttctttttcttttttttcagccgtcttgatgtatgctaactgcccgtgtagccggtgaaggtgcgatgacagctgtgtcccggatctacgggaaaatcggcttccccgggctatggaacggtttgcctgttcgtattgtgatgctgggaactttgaccggtttccaatggctcatgtaagtgtttgctccgttctaatttgcgtgcacagcgatgctaacatccttcagctacgactctttcaaggtgttccttggacttcccaccactggaggtcactagatagtcatggtccttaggtagtcatggttcttggaggttcttttttctagagaaatagtgtatatagcaaggagttaaatggataaacattgataaaaccatattgtgtagaccgccttcgatatcggggcagaataatgttggaggtcatcgcattgttgccgacgacgtttggcactcctcagtcgggtcaccatttcagtcaatcgtactcactctcgtcaccaacgattaatcaacgactgatataggcatactatatcccgctgtctatcatctgagcatttgcctcccttgtatattccacatcacccccttcacatcgtgcttcgagctctgaccaagaagctcaaactaccgtgtccagctccacacacaaataccgacctcctcgctcttcaccaaaatggaagcctcccgccaaccctcctccatcccgccagccaatccccccagcgtggaaatcgcctacaagcgcaagtgcatagcgctgaagaagcgccttgccgaagtcgaagccgagaatgaaatcatgcgcacccgcaaccgccgcggctcccaatacatccagaaaatgcgcttggaaacctgcatgctcctcgaacgtctaacaaaggtcaccggcatggccgacgaggcaaagacaggcaccgcaaacccagaactgcgtgcccgcgccgcagccatgatgaatcctgcacatggggctggtgtgcttctggaagacgatacggagggtagctccgatgagcagccgcgcacagtacgtatctgcataatccacaaatcttaagaaacctatacagacccactgcccggcctatactctcctccctccgtctgtctgcctgatccaagctaactgtgttctttctttatattggatagcccgaggaacgcccgctacgcgttaagcgctcccgcaagtccaacgccaccggcatcgatggcctggacgatgatctccccgctcacgatggacatcccgaatctgtagatcccgctgctgctgcccttccccgtcttgcgccggctccgacacaggagtctcttactcattccttccgtgtgcagacgggcagtggtggctctgcggaacagactcctgttgctgctgaggctggtcctgaggctgtgactacgccgatggatgtggatagggaggaggttaaggagcctaaggttgagcaggcttagtgggtggcttgggtcttgtcgtgtattttctttaattcctttctgggctttgcatagcccggactgagactccgtttttgttttcatttgagggttttatgcatcgggttctgatgcggtgccggtttactttgctaggttttttctttttttttcgttcctttggtgggccttaattgggcctttccactactatacggtctcctggtgtctatgtctgatatgaaattcgtctgagaaatcatgctgaaagcatggatgaagtaattggttcctccttgggcttttgatgtcgctcatttagactaccaagtctgttatggtcactgctagtcaagtcagtgcatagaagcagacagagtaagggaagtggaagagagagcaggctagtggcaatcaaaaggtggatttctgtagttttagggcacggctcaacatcattgtgatattcgggcatcatagcgctgataggacgtacgaactacgaacacttagttccatttccaaagttggaaaacgtctctgaacttatttcgcaaaggcccatagcgattcgattcgattgattgacaccatctgtacagtaatcacaacgccgttttccccgtcacagaaccaacgtcaactccaataccagtaagaaagacagcacactattggaaacaagaatgggatgattatctgggtatgaatgtcctctgtcatgtacaggtgaagacataacgagtttggaaaaatgatacagattgcaagggttgatggtcaggaagattagacgcgggtgtgttttatgttaggtgcttccccctggcaggcggtgttcctggctcggctgtcgatgtagagtcgtattggattgtatgaaaaggcacataagcatataaaagcctaatactcgtagcacaattgattggtcgagacaagcgtcgactagtctactccagcgtagagatcgacgacaatgttgattccagccacgagaatctctgcggcgatcaagacaatgactgatattcgttagctaggttgttgttagaaatcacaactctgggagacttaccaatccattcgagatattcgccatggcgatgtgtcaattgatcctttaggactgcaagcagatccgcaatgacatccagacgttccgtcagcagactaacacgctgatccatctccaggtagcttcggactgcctggtagacaggttccaactgcggctctgcccagaagagctcagggctatcgaggacagacccttgcaagtgaatattgatgcggagaatgaagagctctccaatctgcatattgatttgccgacgggtgagattgacgctaccggtttgcgcaatctgggcaggtagcggtgcagtgtcggtaattgtttctgacacaagatcttcgaaaagcgaggtcttgaccgattgggccagagcatgagagatcgccagcttgaccatgttgttgcgcggatcgcgaagagagatgaagtcgttgtagatcctagcctgatactcgcgcgcatagtagaaattgaagttctcaatctgcgtgtcatcgggactcaatatggaggttgcaaatttggagatatcggataagaatcttgattcttgcgcgggcgtcattccccatattacaaccgttccgtagtcaaagaggaatacctcgggtgtgtggattgtggtgtcaataccaggagtgtctttggcgactacctggtcggcatcattcgagtgaccgcgctcgtcgtgcagatcaatcaagtcctctcttctggtcttcttattgtcttcaacctccaccgcactatccgagtatcttctttcactgggtcgtctctcatgatgtccattgccatttggatctaataaccgtgcgttctgcttttcctcgtactcataatcaaaaggagagtacacgcattcatcatacagcttgggattggctccgcgagtcttgctccgcgatttgaggaacttgataacgccctcaagtcgatatgaattggccgtgcagtaagctgtcactcgaggtatgcgatcgcggtcggctttacccaatcgtgcagcatggcttcgtgcggcagggtccttgatgcgagttatttgtgaatagacatcccgagggaaatctccttcagacccttcttccccctcttccgtgacagggtccggcaacagttttagtttttgtgcttttttggttgtccgctgcggtccaattttagatgccgcatgtggtgtgttcgatacgttagagggagccccatgactattgcgacgacgaagcttgctgtttaatgccgagagcatgggctggctgccaggacggggctgggcgttgacattctgcacaggaggtgagcctgtttgcaacggccgaaatgttggatcggaggtagaggcagtgccataagtgctgatttgtgtgagcggattgaaggataccgaccgcgatgtccggtttgcccgtggtgacgtatttgaggccgagttctgcggcagcagaggagaattctctgcgtcagacgccatggcaaaagagataaaaggtgtagagttatacgccgtgtgccattgacgaatggaattggagctagagaagcaaaaagtgatgaggaaaaagttagaggaagctggcaacgttgagaagctaaagatgtccaccttaataatctgagaatctgcccgagtccggtccttggcgcttttgtatcatttcaatttcgacgcttctctgtatatttcgaggtttcgacagttctatctttatatcttttggaaagactttattgccagacattattagacatgattgactgaattctatatacataaccccccaaagttgaattgcagaccaggtcttactcccaacaccatgcaaccctagtaacacttgcacaaaaatccttttcaatgatcgatcacaaaatggctgcagtagacgcggggttggttgcatgtccaatcgacaccgactttcgattcgcgccaatcgggcatcgaaaccccccgaaaggaacatcagtcgatgcaagtgagcatgtcccccgttggcattgccaggtcgtagatgtaacttccagctatgtttgaagatatgtgacactgaacaaaactcgcttttgatggccgtagaccattttcaatttcaccgacgaacaaatccagaagggccgcctgccttctgtcggagcccattgccctgagctatggtacgggtcttctgaagcatgctactcttgaggttccgtccggccttggagatcttaggggccagcgcgggctttgtggacttctttgacgatggcgcatccagcacccggatagagacatctcccaggttgatatccttgggaagcttgtcctgcttgtctaggaatcgcaacttatttgacttttgaggcatggcaaattgatcttcagccgggggtgtaggagggcgaatggcgaactcagcattcaagatgtcatcgggaagcaaagcaggaagcgcggctcgtcgtgcatcttgggtagttgtgccttggagagtagcggtgctttcggaacgcatgtcatcggttggagactccttgggcttgacaatcgatttagcttgcaacttacgacgctcatcgagtttccgtcgcttctctctcttcagttgctcttctctgtgaaaaatcattagtcaacatcaactttaccaaatgaaaatcacacgtacaattgcttggaagcttcttgcttcttagcctgctccttcattttcaatagctgggcagagttatcaatggtctctggcgcatcatcgtcactatcgtcttcgtcgtcgtcaccctgtgtaggtgtttccgaaatctcttctggctgtgtttcgagtgtttcaggttcctcgctaccaaatcgaatcttcttgcccgcaggtgctttatccccaattacgatagatttctctgggatatgtttcgtagcatctgcggttccagtagccttcggatcgcttcttcttctccgcttggtctgctggtcttcggtcttgctagcacttgctgactgcgccttgcgctttccactcgcaacttcggtcgcaacatttgcgcgtcgggtagctgtcgccatcttggaattggtggcagaggtgccggcggattggggctcttcttcttcgggctgtcgcgtaaatagacccttggcagcagtgaccaagtgagcaaacatagagtaagaaggaaattgagaaataaagcaagaaacccaaatgggggatacggctcctcgtgttggataagaagtgaagcaaaaataaaaaatctctcggcgatcaagatttcccgagagcggagacgataagcaactctttgctatcacttctcttcgtctacttcaccttcacttggtgggcaagtagagtatcttcttttaaattaattaaatcctctttgtctagtcttgaatatcaagttcaagcttctctaaacatcaattggtgctaaaaatctgcgcaaacagcggatttgctctacaaagtcaaaaatatatatatcggtgtcggtgtccaacaagcactgccaaacccaacgtatattatcgcatgaaaacacaatttacctgacatttattgcttggattttgccagatagaacccagtgagcacgaaccaagcaatttgagctatttgttgcaagtcatctacagagtcatacttttctctgctgtctaccccaaaactcaagaaagaaaatatctaaaaatgacttctaaaatattactatcgagccaacggatcatgtcgtttccaactacataggcggacgattcttgacacgtaacatatatgcaatgaagcataacctctatatactgattacggcaaggctgccgggataaagcttatgtcaaaagtaatcctttacccccgctcaagggaccaaggcgtgttgaaatggatatggcatgaaccttgaatattgtacaaccagatgcaaatgataccaccctgtgtgtagactccatcgaaagataagaacgctgtatatagccccaagttgaacgcctagaccgtaaaaaactcctggaaatcattactcattgataccgtagaggttattataaaactcctcgtgcttgcgaaaacactcggcgcgttctaaagcctcctcacgagaccggataaagtcgtcctccccaatggggctgagctcctcccacatctgattatattcgtcttgatcactgccagtcatggcccacatgctctcgcgctgacgcttgttgcgctcccggtcttcctcgatgcgctgctcgatctgcttcttgtcaaggcgcagttggggcttctcagacttcgacttgctgcctccctcggggccttcctcatgttcaagatccaggtgggagggatgggaatcgcggtctttcagagccgcgtcgatctcggccacggtttcggcgctgaggacttccttcgctcggagaccgttcaagacgtgacggacgtgcttgacattggctgcgccagtgccatcgggaggaacgaccgagtcgaccacgcgcaaaatgtctcgttgcatcatgcgcacgtatgggaggtagttttccttgatggccatttcgcagaggtgttcaataaagtacatgatgttcgcacgattgttcatgttgttctgccacatgtaaagtcagaatagatcaacacacaatgaaatcggagctcttacccgctcaagctgctccaggatgcatgagtgaagatcctcatcgaggtcacggtacttcagcgcataatgcgcagccttctgcgatgatgtcacagcagcactgaggtgctgcagctgtgtagtgaagcgcatgcgcacctcaaaaggatcgatcatcattttatcttccggtgttatggcttcctcaagggtaggaagatcagtagccgtaccggtagagatgagagcggtcagttttaaaaagccgacagaaatatgtggggtcagaaaggcggtggggcgaagccgcaattttatttcgataacctgctacgtactccatacataacgtagcgacttctctggcatcatttgaagtgaatattcgtgaacattgtaacaaaatcaagatacaccgagcaatatggtagcaaatatcatcaaagggaatcccgcctcagcgaactaccaagactagacgtatcattcccatcaagcaaaccaacctcttcagcctcattacgattttcgaaatcctggtattcttcgtctcgaagggcttcttctcggcggatttccacgccattcagcactgaccaaacatctttcttggtcagtagtccttgtagaatacccttgttggcaaataacacataacgcaagccaaggcgctggaacattttcaaaacaatcaaaaaggtgatgttactgttcaatgtcatcggtgtctgatccatccaaggtcgtagatcaagggtatcactagggtctgcaaaaggttgatgcgaaaagaagacctgtgtctcgtcggagaggttgcgggctgtaccagaggtcgagtatttcagcgcaaaagaaatctcattgcgggtgatgtagcctagaaggacgggactcgacgtgtctgatactatggggaatccgcgatatgtagtgttagctaggaggttgcggatcgaggcaatagtatgaccggtggcagtaatgatgctgatatcgtccacggttgtcatgacccggttggcagatacgtctggcggagtggtgtcatcacgatgatcgaggaaaggatactcgtttagtcgaatccatgactcgtagatacctcgcttcccgaagatgtcaccacaccacttggacagcatcacagcaatcatgatcgggatgacgtaggtcagcgcgccggtcaattcgaacatgataacgacaattgacaaagtcattcgagtagcaccaccaagagcagcagcagccccgataattgcgtataagccaggtgtgacacatggaatgtctggctcgcacctgctaaacaggaatgcttgcggataagattcttgccacaagcgaactataatgcccagagcacgcccgtaaagagcaccgatagcgaccgaaggaaggatgatacccgcaggaatctcaagtccaaatgtcaaggaagccaagaaaaaggcaagtaaagcagcaacgaccaggtagattgccacgccgattgaggcagatcccgtggcgcagagaccaaatcgatcatatgtcacactgttgcactcggcgaacagcgactggacaagctccgagttctgagcccgcatgaagtgatttggatagttgatcaaagctgtaatgagagccacgacaaccacttcgatgattggtcgagaggaagtccgagctcgcctccatttggtgactttagtattcaggcggatgaggaatgcaccgtagaggccgccaatgatgccaagaataatgaacgggatgatctcaaagcggtgccagcctcgagtgtaggtgacttgatacagcacaattttacctgtccggaatgggttcaaggcttgcaaagtgacagctgcgaccatggcacagacaaagctttgccacattgtcttgtcgggaaaataatatgaaagttgctagaataatcagcaaagtatataggacaagattgaaaatggctcatacctccaaactaaaaagaacacctccgatgggtgccccgaatgcgactgatatacctgctgcagcagccgcagaaagaacctctcgtttgcgtgctgtgaaatgagtaaatgcgcagagggaaatatagaattaatcacgtaccttcattgcctttcaggctttcaaaaggtttcatcaggatattcgcgcaacagcatgcaacatgcacaagtgggccctctttacctagccatagaccggaagccacagaaagacactgatcgttgtcagcaaaaatgccttataacaagaagaagcttgactcaccaggcccagtgatttaatggcaagtgtccatggtcccatgaaatgtcggatgacagttccaccgaggatcgtttttatctcggggattccactgtgtctagcataaacggcataatttcgcaccaagaagcaagcacatgcagcaaagaaaacctagatatgtactgtcaatagagccctaaaggtaagagacagagacatcattaccgaaaatgaaacataaaagacatatccaaccgtatatgcccctccactggactttgcgcctaatgcatttccccaaggtgtccagtctaaacacttagattgatctataccaaatccagattcagtagtgagacttgtagagatttgacgccatcggcttaccatcgagaccccagcagcaaaagctcttgttgagataaaacttgccacctccacttccatttttgcaatatccggacttcaggtcacctagccaatccgttgcaatatcgatagaagcagcgattattcctacagcaatgcctgtcgcaatcaacactaaccagacattgcttgcgtcaagcagtcgacgagcatggcccaatagaccctgtccactcgagtaaagaagccgtttcctttgccgctccttggtatactcgtagatccaatcgatagcagtgaagtcgtcgtagcccacacgtcgtcctgggccttccacgtaccagtccaatggcgcgccatcttttgaggcttcagcaccactattgagccctatcggcgcgtaaggatcgagtggcgatgcatcgccgttctgaccaccttgcggcgccggagagccaaagccagtatccgatccgccggagggaggggagagaaggttagatagactgaaccgtgatcgttgtttttgttttcgcttgaaggagatcctaaataaataacctgatcagcgccgtagcgaaaggtggaggctccaaggcatacggctcatgtaacctctcggcttcccgattcacttcttgaggctgaaggatgtcttgatcagatcccagttgcgtcccagattggccctcgccacctgagccctgaccactcattggaattagtataacataaatgaaccgcgatatcgcgatatcagcatctcctcttaaaaacgaccttgtttcaaggacagctttgttggacgcgcaagtgtggcgcaagctccgcgatcaaaagcggtggggctcaggtctaggcggggctgcgccacaggcggcagaaagaaaaaaaagttggagcgaaagccgatgaagcgggatttcctcttttattacaaacttcacagtttctctcacgaccggattaaacatggatcggaggccggtctatgagaggactcttactgagtccgaacttctcgagcagcttccgagtggaatctcgactttcattcggactgcatcggggacgcaacacctccacgctcttgcgcttggcgcattaaacaacgaatttacagagagcattttcagactatacgaaccgattttcgtcgatcttgcagctagatggcttcaatcggatttacatgccgactacattcatgtattagcggcattcgcgcagattttaccatttgcgccgcacctgcgctcgcttgccagtcaatatgcctcatcacagactggacctttggtggctttggccgtgtcgaaggaattaacactgctacaattggatcaagttagcattagacttctactcctcgccctcttccgacttctttcatttgatcttgaaaccttctctcccatcatttcaccgcttcaactgcagtccctcttccaatcccaagatcgagtaacacgataccttgctgtacgatgctttgccttatatatgcacgcagccgatgcggcaaccgaaaagatggtccgcgtcaataccgggactgagcctatagaaggagagtgggaaggcactctgatcgattaccgtgtgctaggattgtgggaagaacgccgatgggagactcttgggggaattattcgggccgagaggacttccaggacggaaaacaacaccctggcgttgatcgagaggacacgggactctttcacaaccaagaccgcagaaatctgcggtgttttgattcccaggctgaaagatacacccgcggctccttcgtctgtcgtcaagactactaccacagttgaaaatctgcgccgaattgcagggtcattactcggttacaaacccatcctgctggtcggtttgcccaactccgggaagacctctttgattaatgatattgctgccacgatgggccagattgaaactatggtcacacttcacttgaacgaacagacagatgcgaagagtctgcttggaatgtatgccacttcatctgcctccggatcattttcttggcagcctggtgtattgaccaaggctgcacgcgaaggtcgctgggtgttgattgaagaccttgatcgtgctccatctgaagtaatgggcctcattctcccgatcattgagaggggcgagctcactatcccgagcaggagggagcgaatcaagtgtgccgagggcttcaaaatcatcgcaaccatgaagtcatcgtacaacattgccggcgaggagatcgcaccgagcaattcaatgctcggaagcagactctgggagagagtgcaagtcaagtctcttcccgtggatgagatgcgtgatgtcatcctgcaaaagttctctttgcttgagtctcgtgtgccaactctcatgaacgtctacggacgagtatgctctgcattccatggaagtcttgcgatcaagggctctcaaggccgtaccccgggcttccgcgatttgatcaagttgtgcaaccgtctgcacaatcgcctacaccgcataggtgcgaagactggctatgagcccacgtcagaaggtaccgaggatgaaatattcctcgacattgttgacgtgttcctccggtatctgcccgagaagtcaatgcaaagcactctcgccgccgttgtggccgaagcgcttcaaatttctccccagcgagcgcaatattgtctcaatgaacgcaccccctcttatatcgacaagaacaacagccttgttcttggcagagaaacctgtaacaagatcaaagtaccaagtggatctgcattgaagcttgccgcagcagcttcacgatttgcccccacccgagcggcattaaccctcatggaacaggtagctgcctcaatccagatggcagagcctgttttacttgttggagaaactggtatcggaaagaccacggtcatccagcatcttgcatctttgatgcgtcagaaactcacagtagtaaatttgtcacaacagagtgaaagcactgatctgctgggtggtttcaaacccgtcaacatccgtacaatggcagttccaatgctcgatgaattcactcagctctttgaactgactttctcggccaaaaagaaccagaagttcttgtcgtccatatcgaagagtgccgcgtcttccaattgggtacgattggtgaccttgtggcacgaagccgttcgtcttgcaaatggagtgttcaatccctcgaatgccacaggggagaatggcgatgaacagccagccaaaaaacggaagctggattctcccaaataccagcacttgcggcaaagatgggagagcttcgcaacacagctcggagatttcgaggctcaggtctcacaaggtgatgccaaatttgcctttgcctttgtccaaggtaagattgtgagagccctacgaaacggcgaatgggtcctcctggatgaagtgaacttggcttcccctgatacccttgagaatattgccagtcttctgcaccacggaagtgagggaacgccatctgttctcctctccgaggctggcgatgttgagagagtcttcggccacccggaattccgtatcttcggtgctatgaaccctgcaacagatgctggaaagagagaccttccccccggtttgcgttctcggttcaccgaattctacgtacactcacccgatagcgacttggatgatttattggctttgatccagaaataccttggtgatttgacaatcagtgaccagcgtgccgtgccagacctcgcacagctttacatggtgaccaagaagctcagcaacgagaacaagcttactgatggagctggacagcgacctcatttcagtatccgtactcttgtgcgggccttgatctatgtcatcgaccacgcacatgtctacgggctacgcagggcaatgtttgagggttttagtatgagtttcttgaccgtgctgagcttggtctccgaacgggctttgatacctctacttgagcttcatatctttgggaacgcgaagaacgccaagtctcttctcggacagaccccccgcccaccaactgatggcaatgattatgtgcaattcaaacattactggatgcgccgcggtcctatgctcccggaggagcagccacactacattatcaccccattcattgagaagaatctgaagaacttagtccgggctagttcaactcggcgattccccgttctgctccagggtccgacatcagccggaaagacgagtatgatcgagtatctggcaaaggtgtctggaaacaaatttgtacgaattaacaatcacgagcatacagatctgcaagagtacctagggtcttacatctcgtcagacgatggaagcctgcgttatcaagagggtgtgttggtggaggcgctgcggaacggttattggattgtgctggatgagctgaatctagcgccttctgatgttcttgaagcccttaaccgactcctcgatgataatcgtgagcttttcattcccgaaactcaagaagttgtccacccgcatccgaacttcatgctgtttgccacgcaaaatcccgctggtctgtacggtggccgaaaggtcctatcccgtgccttcaggaaccgtttcctcgagctgcacttcgatgacattccagaaagcgagctggaatttattctgaaagaacgttctcagatcgctccctccttctgcacgcggattgttgaagtttaccggaaattgtccttgctgcgtcagtctaatcgactctttgagcaaaagaacagttttgccactctgcgtgatcttttccgatgggctcttcgtgatgccgatgatcgcgagcagctagcagtcaacggttatatgcttctcggcgagcgtgttcgaaatccccaagagaaagccgccgtcaaaaccgtgatcgaggaagtgatgaaggtaaaactggacgaggatactttgtatagctctgcagagctggaaaagaatgctcctgagatgagcgagcttccaattggtattgtgtggactaaagccatgagacgtctattcattctcgtttcgaaggccctcaagaacaacgaaccagtccttcttgtcggagaaaccggttgcggtaagacccagctatgccaggccgtcgctgaagctttccgacgcgagttgttcattgtcaacgctcatgtcaatttggagaccggcgacttgattggtgctcaacggcctatccgaaaccgggctgctatcgagaaacagcttgtagatgaccttcaaattctccttcacgggcagctgagcggcgcgtctttcgatgacttgaagcaggaattcacagcattgaccgcggagcagcgccaagccaaggatcagcttctcttgaagaagattgagaagaacgctattcgctgcaatgccctgtttgaatggtccgacggaagcctgattaccgccatgaagaccggtcaattcttccttcttgacgagatttctctcgcggatgactccgttcttgaaagactcaacagtgttctggaacctgctaggtcgattcttctcgctgagaagggccccgttgattcaatggttgtggcagatggtggattccaattcttatccactatgaaccccggaggtgattacggaaaacgtgagctttcggctgctcttcgcaaccgcatgacagaaatctgggcacctcagctgtctgaagatgaggacatcttgccgatcctctcacagagattggatctgaaggatgagagcgtcgcaacggctatgctgcgattcgccaagtggtttaaagtaaccttccagaactcctctgccacatcgctctcgattcgtgatcttcttgcctgggttgactttgtcaatacttgtcaaagagcagacaccccatttgctatcgtacaaggtgctgcgatggtcttcgtcgacaccttgggtgcgaaccctgccgcaatgcttgccatttccctcaacaatcttgagggcaaccgcaagtcatgtctcgacaagctgagcgaactgttcaatgtcgatgcttccaagatctactgggaatcgaccaccgtctccgcggaacccggcgttctgcgcgtcggaccatttgctctacctacggctggtacagcagaccccgatcctcaattcacaatggatgccccaactacaatcgccaactctgtgagaattgctcggggtttgcagtcatcgaagcctatccttatggaaggaagcccaggtgtgggtaagactacacttgtgacggctctggccagagctcttggcaaacctctcactcgaatcaacctctcggaacagacagatcttacagacctattcggttcagacgttccagtggaaggaggagatgtcgggcaattcacttggcgtgacgctccattcctacgagccatgcagcgtggtgactgggttctgctcgatgaaatgaacctggcctcgcaatctgtccttgaaggtctcaactcttgtctcgatcatcgccagcaggtttatatcgctgagctggaccagacattcaagagacaccccgatttcgttctctttgccgctcaaaaccctcaccatcagggtggtggcagaaagggtctccctgcatcttttgtcaaccgatttacagtggtctatgcagacagcttcactgacgatgacttgaaaacgatttgttccagacttttccctggcagtccctctgtgcagaccgagagattggttgatttcatttccctcttgaaccaagcgatcacacgagatcgtcggctgggaaccatcggtgggccatgggaagtcaatctgcgtgatatccagcgatggcttcaacttgccgatcgaggaaacctacagatccagacaaagcacttccttaatgtcgttatcagccagcgattcagaagcgaagaggatcgtaacgtggtctctcagatttatgaccgtgttttcacagactctgatactggctcggagagctacttccacaacctcacacctgaatacttgcaagtcggtctgggcgttttgacccgtgaccctctgctgcagcgcttggccgaaccaaacatgaggattctaccaaatgatcttcatattgccgagtcgctcattttgtgtatcgataactcctggccgagcatcttagttggtcctgctgggtgtggcaagactactctcatcagaaagctggcagcggtcaacggtgcaaaccttgtcgagctagctttgagttctgatactgatactatggatctaattggtggattcgaacaaatcgatcatcgcagagaggtttcaggctttgtccatgatattgagatgttcttgcgaaaccagctcatccaatgctttgcttcaggggatgtatctgatgttgtgatttctgcactccaaatttgcgagcatttccagtctgcagatatctcgctggaaaatgtcatcccctcgctttccagcctttgccagtcttcttccgaccctgtctaccaacaattcctcgagagagcccaaaccttgttaaatgcaatccaacaatccgataaaatgaaggttggatttgaatggacagaaggtgtcctcactcaggctgttcaacatggaaattgggttattcttgacaatgctaacctgtgcaacccatccgtcctcgatcgactgaattcgttgacggaaccgaatggcacactcattctcaatgagcaacggacagacgatggatctgccaaggttatcacgccccatgtcaactttagaatcttcttgacaatggacccccgcaatggcgagctgtctcgtgccatgaggaaccgttgtaccgaaatctgtttcttgccaagtgagatgcaagacatccaacctaccataggcccatcttacacctgtgaatcgttcctctatcgacttcgccatatttggaacttggatacctccttgccatcgtctgcctttgaagacgctctcgaggtgtgcttggatcatctttcaccagcggatctggcctaccttcaacagtcaccaagcaaccgtgtggctatcaactccgagcacaacggagaagacaagccatccaatgttctgcagcgctatacctctctgttccatgacaacaaccaatggaagccgcttgacatcgccagcggcgagattgtgcttggtggggcccaccttggtatccgaggaatgttgcagcctcttcacccgcttacaaatgagcctctgatagctattgcaggaaccagtgatttccggtctagtttgattgtcttggcttatcttcaggagctgagacttgatattcatcgcctcagggaaggtttgattcaagccgacgtatccggaaaagagctcaagcctagccaaatgacacgtttggagcggtcattggcatctgagcggatccctgcgttgatgaaagacacaacgcaacctgttgcctcgttcttgtctgattgtggccaggctctgtatgattacattcagtcgttggatcaaatctctctccaaggccctgtaataatcgcagcccttcggaccgttatctgtctatgctgggacatttacagagccacagaggttagtcaggttgatgaaggagaattccaagtctaccttcagatgggccgaaagatctgcgggtcgttgctcgactcgtcccctcttctcaacccgctccaagtcgctttatcacaggccctggatcgattccaggaagggtgggctttgacgactggtcttagcatgcaaagaatctgggattcttggagacatgtcactcctatctctcaagataagttgaattctctaaccgagttggagtcaacagtctttgatttcacaactttggctttgcaaacccgtgtggaattgtctcaattgagtcgtgtgcgcaactcattgattgatgcccagcgattcattcttctggatggtgctgatggtgacgtacttgttcaggtattttagatctgctgccaaacccgaagaattatatatgctaactatgaatagggtatcaaacaaaccgtcgctgagctatctcatgcagttcgacgttcagagtcaaccgagtatccatactttgcaaacgatttcgaagctctttgccagtaccacgacatctcctcatttttccagaacccagtccacgatactgtcatccagacagtcctgccactcctcgctggtcgtgcggctcgtccattagacacgtcgaatttccaaagcgacgtgccaaatattctccatagaatctcgctatttgcgggttcttcaagcaaatccgagtctgcgcttgctactggtggtattatttctctgtcgctattggataagctggcaactatcggcaatacaaaattggggcagatggacatgcttgaggcagagaaacaggctctctccaaggctatttccttgagcagtcaacagatcacaacagaccagtccatggtccttggacgtactatcgctaagctcacagccgagctggtggcttgtcatcgggagttcttcgagcctcgctcagccgaggatctcatctctgttctgcaagcgatccaaaatggggatctttgcgttgaacagtcacctatcaaggttgaactagaccaaagcttgccaaatgctctcttctttaggcccctcgccgaacaggctctaccggctctgatttcgtccctccaagcatcaagccagcagcagagcattcgaaccactggactggcagcagtacagctagcagtcattcttctgcgtctattcgtccccgacaagacatttgacccttctctcggtctcgttgttcaacgcaaacgccactctcaacgtctgcaagaatacacggccaagtctgcagcaattcttgcctttgagaagtctttcaccaaccaggtttccaacctccggtctgaacttctgcacaatgaaatccgtgatctaggttctgccccccctccttcactggtaaaccggccccagcagtcccagttgagtctcttgcagggagagttcgtcaatttaatcaacactgtcctgaagagagacccggagcaaatggtccgctctgccgaatcttcgcagtcccaagacatgatccagcttctgcgtaataacatcaaacaattgagcagtcgtcttagcactcactacagatcctatgacgatataaccgtgcccgtggttcgtttcttgcagcttttggaccttggtgtgttcttggcgtctagccagccggaacagtctggcgatattcctgatattcagtctctgagcgcgcgaacaccctttttaggaggtatccaccaccccgttcttgctcaggatgatcggaaggcccctggcaccctgaagaatgcaaacgaaatgcgccttcaagaactgtcggccctttgggccgccaaggatgcggattccacaatcttgaatacaaaggctggacgagatattattcgccgtgttttcgctgatttccatcaactatggaagactaagctcgaagaagatcgggagctagaagccgaaaagggagaattgtaccgcttcaagggatcctgggaagaggaagaagaagtcaacgaagccgagctacatgcacttttccctacattcgatgaaggatcagctgaagacacagaaacgacggatgctgctgaccgtattgaccccaagagcatcgctctccggcttgcctcgcttcatgcaaatatcgtctcgaatgagcgcagtggaactgcattgactacccttgtcaagcaatcagggcatcttttgggctcaatctggtctgaaaacaagacatcattctcgcctatgtcaccccagaaccatcttcctgcagttcttctacttctcgatgatgccataggcgagggaaccaacaatcaccaaaagaattacaacttctacaccgattcgaatctcgaagaggcaaggaagctggttgctctcgcgctttctgttcaagcccgctttgcccagatccaaactgcctggcctgaacatgttgtcctcgctgatgtcattcaatgctgcgtgcaaatccttcaattcaagcacactgaacctgttgccaagttcatgaccaaggttgaaaagcttcattcattcgtacatgagtggcagaccgtggccagcagagaatattcagctgttaccgtctacgacgagattacatctattctcattagctggcgccgtcttgagctgtcaacttgggctaagctcttagatatcgagaaagagcgatgcgaggacgaggtaagtgcttggtggttcatcgcctatgaagtactcatcggcgctcccatcatgatggtcgaggcaggcgaacaagacatgaccgaacacacccaaaacttggtcttgactctagagcaattcttcaattctacaactacagggcagtttgctcgccgtctacagcttgttgcaaacttccaagcattgcttgaagttttcaccacagattatccctgcctcaagaagcttgtctctgccttggacaacttcctccaccactacggacccttccagcctggggtggacaagtatctgacggagaagcggtcggttcttgagaaggatatcaaggagcaaattcagcttgcgagctggaaagatgtcaacattgtggctttgaaggaaagcgccagaaggtcgcatgtgaaactattcaagttggttcgaaagtaccgtgcagcccttggccagccagttcaatcaatccttgaagcaggccttccggaaagcacggaggagatcacttccatgtcacaagcagagccggttcgccccactgccacgttccccgaggcaatggccatttgtcaaaatgataaaaagctgtggtccactcgagcgctcagatttcagaagccggatggaacagccaacaacatgatgaatttgtattcttcaattccagccgagttcgacattgcgaaggatctcgacagcttcattgtctccgtgattgaaagtatgaatgagttcaagtccaagacacccaaggtcctgaacgaagacaacaaggacgacgtccagcacctcaaatcccagaaacgccgtctctatgccgagaccctcaaacaactatatgagatgggtgtgaaacgtaatgctggatcgagtgtgattgaaacccaagaaacagttcctcaagttctcgccactagtgccgcctttgaggctggcgctgcaacctcaactgcagttcagagtgccgactggtacttccacagacttctggatctcctgcctaagacccgcctagcgtctcgcaactattccgaggagctaagcaacgtcgaagtccaccgaagcatggggtctattgagcatctcattctcaccgtccgccgccagagaggtgtcatttcgcctgccctcacaggcttgggcaagctgaagtctacgcttgacaaggtgcagaacctttgggcagcgacttcaaactatctgtcgcaagaccatgcttctgcatcggagaagcgaaccaatctagctagaatcgtggcttggctagcgcctattcttggacttgccgcaatgattattggagtgcattccaagttctcgggaattgacgcatctaagattgtggaacagctccgcgccaaaaaggcatccttcgatagcctacgcaagtcgcatgaagctcttcccatgcttcctacgaggattgcgtctaacgcaaaccacgagatcgcgcagcaggcacaatcgtcgctcgatgaattggcggctgacttgaagcaatggagtcaagctcgccctgatctgtccttcgcgctggatcagattacaccttgggtcaagacaaaggttgctgatgtccctgaggttaatgatgagaacagcctatccatccaagccttcgatagcagcctcctgacggccattgacaaaatgctcatcggcctgcagaagctcaaggatgtgccttctgccatcacctttgatggattgctgtcgaggagtgatgagttcttctctcgcggtattaaggctgtccatctcccagagatcaccgccgcattggagaaggtccttgaccaattgcacctcctgcaagatcactccgctggcggtctctccgttgctgccgcactgctcaccagtatcttgcctatcgccaacagatactaccaaatctgccgggatctggctgatcggttcatcgccgttcaccgcgagatctgtaagacatcctacatcctgaccaagactttcaagcaggtcgcctccgaaggcttctgtagtcctgccgaagcctcccaagatcaaggcaaggaaggccagatggaaagtggaactggtctcggtgaaggagaaggagcggaggatatcagcaaagatgttggtgatgacgaagatctatctgagttggcgcaacaagagaacaagaaagaggacggtgatgatgagatggatgattccaaggatgctgtcaacatggatcaggaagagttggaaggtgatgccgaggatcgcaaggacgaggaggaggagaacgacgacagtgccgaggaaggagatgacgatatcgacgaagagacgggaagcgttgatgaccttgaccctggtgctgtggatgaaaagctctgggacggtggtaatgatgagcagcagaaggatactgagaatgaagaaggaaagggccaatcggaggccgagcaacaagctgctgctcaggaagagaagggcgacaaggatgaaaatggtgaagaaaagcaaaaggaaggagaggaagaggaagaggaagaaacagaagatgaagaggcccccgaagacgagggtgaggcagttggacgtgaagaaatggacgtcaccgaccctcaagcaaaggaagaagaaacacttgaacttcccgaggaaatgcaacttgatgatggtgaaggcaaggatgacaatggcgaggacgacgatgacatggatgaccttgacgacgatttcggtcccgcccccgaagaagaagcagaagggaaggacgaagatgtcaatgatgaagccggcgaagaagatgccgaggcagcagaagatcaagtgccaggtgaggaagatgaagaaatggccgatgatgcggaggaaaccaacgaaggcgaagccggagaagaggaggaagaggaagctggtggcgaagatcccgaggagtctgagcaagacgacttcctcgcacagcgtgatgagaatgatgccgcaggtgacaacgtcgctcctagtgaagctgttactggcgggctcggagccgagcaagaccaaaatgaagaaaagggtgcatcgggtgacgctcagcaggagagcggctcgactgatcccagtgccaatgtcgaccaacagacaggcgctgctaaggatagcgaggagagccagcccagccgagacgctgctggcggcgaagatcacgggccagatgaacctcagatgcaggcattcaagaagctcggtgatatcctcgagcaatggcaccgacgacaaaaggagattctcaatccatctcaacaggaagaggaatcccaagctatgccccaagacactgatatggccgacgcggactttgagcacctaaaggatgacgatgatgccgcagacacccaggcccttggacaagcaaacgacgaccaaacgcaagccctcgaccaaagcaagggtgtggagtccgacatcaagcctggcgagaacgatgttctcccagacgtgtcggacgagcagcaagatgccgtggacaaccagcttgaggatgagatggaaatcgaccgcgagaatgttcccacagatggcgagtccgttggcgccttcattcctagcggtcaatcatcccacgatcgcgcagacggagcacaaggcaccgaagaagtggacgaggaactggacgaagttgactcgcaactcgcagcaatccatctctcctcttcgcttcccccattgactccacaagacgaagcccgccgcctctggtcgcactatgagtctgccacaaacgacctctccctctccctgaccgaacaactccgtctcattctcgcccccacaatggccaccaagctccgcggtgacttccgcactggaaagcggctgaacatcaagcgtatcattccctacatcgcatcccagtacaagcgcgacaagatctggatgcgccgctctatcccctcaaagcgtaactaccagatcatgctggccgtcgacgacagcaagtctatgctggaaagtggcagtggtcagctcgcctttgagaccctcgccctcgttgccaagagtctgagcatgctggaagctggtgacttgtgtgttctcggcttcggtgacgaagagcacgttcgtgtcgcccacgaattcggaaagcctttctcctccgaggcaggctcccaggtcttccagcacttcagctaccagcaaactggtaccaatgtgcgcaagctgattgccgactctatcgctctcttccgcgaggctcgctggaagcgctcgcctggttccggctctgccgatctctggcagcttcagttgattatctctgatggtatctgtgaagaccatgataccattcgccgtcttgtcaggcaggcgcttgaggagcgcatcatggttgtctttattatcgtcgatgctgtcaagggtagctccatccttgacctctcgcaggctagctttgaggccgatcctggctctggtggtgagatgaagctcaagatgaagcgatacctcgaggacttccccttcccttactaccttgtcgttcgtgatgtgaaggagttgccctctgttctggccactgcactcaagcagtggttcgccgaagttgtggatgtgtcgtcttgatacccccaaaaataaaaggagttggaatgcggatttagagttatttagttacatttgacggcgttggatgatttttctttgtatatgatagattttatagatgtgatacatcagtcgaatgtacaacaacattttttaatttctttattcaaattcccgtatgtcatttcctacagaatgttatggtatctcaatgctaatgcgcttgacaaaaattcccccaaagtggccttacgtatgctacaactaccatccgtacttggatccagcttccctcttgttcctccgacccgttgcaaagctttcctccagtgcctccttctgagagcttgcaacattgagcaattgctgtagggtatgctttcccggcgcaatggagcgtacagggttgtgctgcgctccggctagctcggtttgcgccagaacctggttcgacttgtactcctcgtccgtgttgaaggtacgcacctgtgactgcgacggcgtggcgttccgaccgaagagctggcgcctttcggccttggacaagttcaggtcgttggcaatgctatccaaggatgacgtaggattggatgatactgttgccgtggaatagtctatggcgactgatgcaggctcggcgagtacttgaccagctgctgataactcttcgtcttcggcgttgtataccagcggctggtaggttgctgatggtccaggtgccgggcctggctgagaagtggcctcgtccgaagatagcgagaagagactgactttgggttttggtggtgcaggagcggggacgggggcctgctgtagaggttgagcgctcggcgctgctgccgaggaaggttttggctgctcggcaatcttctcggcattcttggtggtctttctcttcttttgaggtcgtccgacggataacggtctgaacatcatcggatttccttgcaatttgacttccgctggggttttcattgtgtccgccagtgcatctgatgcagtgtcgggttttgagctgccaggtgcagatgtagtgtcctccgcatctccgcccgccagattttcgaatgcgtaatcattcttcatctccgcatcagctgtgcgatcaaacccagggcctgctcccgttttgagactaaacggttttcgtgttgtcgccacttgtgctttcttttcgagtgttcgtttcggcgctggaaggaaagcgttgaatccggaaaagccccctcctccaccgagacgagcctttttgcgcggaccatcttcggtttcttcgccagatgtgtgttcaggttggatttccggaatcgcgacgcggatcttgcctgggttgctgcggtcgaccagggatccagttttggagccgagtttctttgccctgccaaacttgggtgcgggtgtagtggttggctcggcgtctgagccttcagagtcagagtagcctactagacccatgatgggagagttttggtagagttgttgttgtttccatgacgtttgagggatttggcgacaagttaaattatttgccgcctgaccattcaggcatcatggtattacgtaatcatatcatcccgaatctcgatttgggatgatggaaaggagaagcaagacattacatagtggactgagggacggggatggaatggaccaacgagaaaaatgtccgaagccacagcctaaaactctcctttgacagtgaaacaccagggatgatcccatcactttgtaacgtcatcgcatccgggttctccgcttcgaatgagcttagcaggatcatacattggacaatggtgttaatagacatgcatagtcacttggatcatctgaagcaaccagccctaggatctgatctgatatatgtagaagttgagacatgttgataagtcaaaataggagtgactcgacggaataatggaataataacaccaccatgatcagaaagtaagagaaatagtttctaatagagaccaaatcgacctcataaaccaaattgaccaaatattaatctcccaaatagacatatcagctcaataggggtgttcaagagttcaggtgtgaagtccataatgaaagatcaatgcgtcattctggccgctgcccctccccacttaatccggacctcccattccagcttctctccttatccacccccccccccccccccccccccccaaccccccccannnnnnnnnnnnnnnnnnnnnnnnnnnnnnnnnnnnnnnnnnnnnnnnnnnnnnnnnnnnnnnnnnnnnnnnnnnnnnnnnnnnnnnnnnnnnnnnnnnnnnnnnnnnnnnnnnnnnnnnnnnnnnnnnnnnnnnnnnnnnnnnnnnnnnnnnnnnnnnnnnnnnnnnnnnnnnnnnnnnnnnnnnnnnnnnnnnnnnnnnnnnnnnnnnnnnnnnnnnnnnnnnnnnnnnnnnnnnnnnnnnnnnnnnnnnnnnnnnnnnnnnnnnnnnnnnnnnnnnnnnnnnnnnnnnnnnnnnnnnnnnnnnnnnnnnnnnnnnnnnnnnnnnnnnnnnnnnnnnnnnnnnnnnnnnnnnnnnnnnnnnnnnnnnnnnnnnnnnnnnnnnnnnnnnnnnnnnnnnnnnnnnnnnnnnnnnatccccccttccctccttccccccccccccccccccccccaatggccccaaagcccgtctaatcttctcttcatgccgagtttaggaggtttattgaagaagaggcgaacgaaggattcgcaagaccacgggaaaccagatactcagaaccacgacggttcaggcgcatccatgcaacccgcttcacacggtacgccccagcaccacacgggtacgggtacacacaacaatgtcgccagcatcgaccacattataaaccaggagcagccgaagcaagagcgtgttacaaagggaaagtactctcaggaggactttgagcttcagcgcaccttgggaacagggagcttcggccgtgtgcacctggtgcagtctaaccacaatcatcgcttctatgcaatgaaagtgttgaagaaggcccaggtggtcaagatgaagcaaatcgagcacacaaatgacgagcgccgaatgttaaatcgggtgcggcatccattcctcgttaccttatggggaacttggcaggactctcggaacctctatatggtcatggactttgtggagggaggcgaattgttcagtctcctgcgcaagtcacaagtgagtgatcccatgaccacttccttggttttgtgtgtgtgaacaaagaactcatttgtcattagcgcttcccgaacccggtggccaaattctatgccgcggaggttaccctagcgctcgagtatttgcactcacaccagatcatctatcgtgatctgaagccagaaaatcttctgttagaccgtcatggtcatctcaagatcacggattttgggtttgctaaaaacgtgccggatattacatggacactttgtggtaccccagactacctagcacccgaggttgtctcttccaagggatacaacaaatcagttgactggtaagtctgctttcaatgcttctgtcgaattgctctaactgtcctaaggtggtcattgggaatcttaatctttgaaatgctgtgtggcttcactcctttctgggacagcggatccccagtcaagatatacgagaatattctgcggggcaaagtcaagtatcctccatacttgcacgccgacgcagtcgatctgctctctcagctgatcacagctgacctcaccaagcgcctcgggaacttgcacggtggcccgagcgatgtcaagaaccatgcctggttcgccgaagtcacttgggaccggctggctcgtaaggatatcgatgcgccgtatatcccacccattcgcggtggacagggcgatgcaagccaatacgacaagtatccggaagagacagagcactatggccaggaaggagaagatccgtatgtatttctttccatgccacccgcacgcctgactaactagttccagatacggtcaccttttccccgacttctaaggtgcttgtataattttatgacgcgacgaaaagtcctttgggggagggccggaactgattgacctcgggaggagtcgtgaaaaaccaggagccattatatgaaaatccatacttttctatatgcacatcatttttcttagcaattacaatcgaattcttgtgtttcttttttctttcaattgcctgctcgatgtacaaatgggttcgtcgtgaaccctgttctattcccaatctctccaaccaccggggcacaaaaagccacgcccatattatacacgggctaccaggccgcttctatcgtacagtagttcatacacagaggtgtgtgtgtgtgtgtgtctttttcttcttgtttcgtccttcaaattccttgcttctgattcgatgatggatccaacttagcccaggattccgctgccgccctcgggcatgccggtagccatggaggcaatggcagcagcatcctgaccaccgagacgcttggtttccacgccgatacgggcgatgtaggtcttgcttgtggtgttccacatggcgatgtacttctccatgcagctggacaggcaggtattctccttggccgagagcgaggtaccgggggcaggaacgcaggccttgaagcagtgcttgttgattttctgaggttgatgttagttggttgccggatttggatatcaagggtggtgacgtactccgatcagggcgcgggcgttcgacatggcggcctcctgctggagctggcgcatgactgctgccttgatctcctcggaggtctgaataggagcgggggagctagaaccgaagagcgacattatgagagagtgaggttggtggaaaagtgcaaatgagatggtgttgaattggatcgaaccgaagaaagtcggacttcaggatctgagatgcagggttgtggctggtgtgttcgctgcgccacatccgatgtggacaccttagcataacgagctgtatacttcacctcccttgtctccacgcctgaactttgcctattcactctttcttgtcattttttcgacttcctcaaggcctcttttcttatttctttctcactgggttttcgggtcctggtgacaccgtaccccgtctatcccacctccagtctatctttgaaacactttgggctcccctccattgagccctaatacaattccacaatgcgtcttccgtctatttcctcgcttctctgcttcgcgggcttggtcgccttacccgtgaatgcctacgatgacccaaatatcaaaagcatccccgtatgtgctcaatgttgactccgtttcaagccgaggtactaactttggacatctgtcagcttcgcacccatagcctctctccggtatgatcataacccgcgaacacactgtgcacggatcgtgctccgaggaggaatatcagtattgaccgatgtaacagccatacctcgattcagacttccaaagccgctggttcgacttcggaggagatacagtaatccgcgctgacaagtgagatattccggtcttcaggtggactctgtaatcagtgctgattttcgtctttgttcagatacgttcgcctcacggctgaccggccatcgcagcaaggatggatctcctcccgcgtacctctgaccgcaaccaattggcaggtaaattcacgaaccccgcggaacagaatatgggccaaaagctcacgtacgcctctgctagattgagctcgagtttgagatccacggctccggcaacttgcatggtgatggatttgccctctggctcaccaaggagcgtgccacacagggccctgtcttcggttcgacagacagattcgagggtctcggtgtcttcttcgacacctataagaacaaccgccccggcgtgtcgttcccttacnnnnnnnnnnnnnnnnnnnnnnnnnnnnnnnnnnnnnnnnnnnnnnnnnnnnnnnnnnnnnnnnnnnnnnnnnnnnnnnnnnnnnnnnnnnnnnnnnnnnnnnnnnnnnnnnnnnnnnnnnnnnnnnnnnnnnnnnnnnnnnnnnnnnnnnnnnnnnnnnnnnnnnnnnnnnnnnnnnnnnnnnnnnnnnnnnnnnnnnnnnnnnnnnnnnnnnnnnnnnnnnnnnnnnnnnnnnnnnnnnnnnnnnnnnnnnnnnnnnnnnnnnnnnnnnnnnnnnnnnnnnnnnnnnnnnnnnnnnnnnnnnnnnnnnnnnnnngggctcggtgtcttcttcgccacctataagaacaaccgccccggtgtgtcgttcccttacgtcatggcgatgatgggcgatgggcagacctcctatgaccaggcgcatgacggcaaggcgaacgagctagccggttgctctgtgagttgacattgattcgcggctgttttggatataccgctaactgttcacaggctcgtggtctccgcagcgccccagttcccacaaaggctcgtcttacctacttccaggacaagtccctgtccctggagctacagtacaagtccgaagacacatggaccgagtgcttcaatctttccgctgaggattctaacatcgccatcccctccgtcgcatacctgggcctctccgccgagaccggcgagctgagtgacaaccacgacatcatctccctcaaggccgagaacctatactcacttaaccgcgggaagaccacagaagaccggtccaagggccgtgtccgctcctcccccaagcctgttaaggagctcaaggagaagagtagctggacttggttcctcttcaagatcgtgctgttcttcggcgttgttgtcggtggttactttggctggacggtctaccggaccaagacccggtcatcgcgtttctaaatttacgttgtatggacatttggtaaagcacaggtcttaaaccttcttctgtgcggttcaagttggtctctgggtttgcccagtttttgcatatatagcccctttgaagctcttctttttactttcatctacgttcagctcgcactacagttcttgttatcttttctcttcatctttgaaatgaatcaaagtcacgatcattcataatttgctctgatatgcagcatgatgcttggggtatcaatagtattacaagtaataaaacaaaacgccgcccaatggagagacctccgtcgttacttctgccgttctctctcctcgttccacaagccatctacaatctggaagacctcagtaacgctgcgcatgacagtatcatcaatccctaacgcgccatagcgatgctgaatcttatcgggatgccagcgaatgcgctccgctttaagcgtaccaagcaggtccgccggcggcggagcatggcgcatgaactcctcaacagcttgaggtcgaacatcaaccctcttcccagagcgaacaggccagaagagcagattgcgcagcgacttaggagccgattcctccgcaaccttccgaatagtctcccatctctccaaatactcagcccagggtgcaccccactcagtctttgctctcttgcgctgcgctcctcgccgtagactctcgtccatagcacgttcaaactcctccctcccagactgcgcgttcctctgagcctcctccttccttttctgctgccgctcagcccgcagccgctcctgctcggctaacatgccctcccgtgtccgctcccacatccgtcgacgtacgtagtcaacatattcctcctccgtcatctgttctagctcgccctccggcccgcgttgtacgtccgggacacggtagttatggatgggctggccgtagacggattcccagtatgcggcaccttcgtcgtcgccgagagcgtcgaagagtgactcgcggaatgtgtccgctgttgagttgaaggagttttcgtatgtcgggtcggacttcttgtcctcgcgatggtgtcgcttggacggttcactgtctcgtgtccgtgatctgtgacggtgtttccgctttcggtgaggctgactcccatctttgaagcgaaatgcccgggtgtggcctgtccgggtatgttctttggggtcctcggtaggtttggtggctcgaggatgctctgcggggggagatgccccaggcccctcggtaggtgtggggtttgagttcattataaattgtattttagatggcggagtagctccaattggcagacctcattgtttgggagttgttgagtcaagtaaaacatcgggtgaatgtcaaaaagttgaaggagccaacctaatctggaaagcggagataacgtgtcttagtcatcttatctccacccccacatctacaagacctcatagaagacatcgcctccgtaagaaaggcattgaatgtataaaatctaaatttgggacacagcttctggacgatcatcgagtcttcatcttctgagggtttgagcctccatatggatattttaattgtaaaaatagtgtcattatttgaagaagagctaaagcagagctaagaagccaatatgtgtcggtagagctataagccttgaattctccagacctggcatgaaatcaaattcaaattatcaagtgagatctggttgtctttctctggtaaggagatcggttggtggccgaacagctcctcggtcctgacgatcaatggtggaatatcaacttgacacagccactgtaagaatgaattcaaaattagggtgacaaacgaccaaaacgacaccgaagaccaaggaagacttaccaattcacactgtttcgtgctctgacccagtgttagcaacgcttgttgcagtttcatcccccgtatatagtttatcttgaatggctgatccctcttgccttgtccaatcgtgcagagcgatatggaagcaatgaaatatacaggctgtctctgaagggaccaagttttttcggcagtttgtggtggactcaatgactaccagtgattgcattagtagtagcatagtagcgtagtcttgtcaccgcaaacctgatgtctggtctgattttgattagccagtttagcataccgaccatcatgtggtagtagtcatagtcgcctttttgtataacttcggctttggagatgatgaaaagagaacaagagcacttttataacgggggcatcgccttcatcgctgtaaatattcttttccttttgatgtagcgacatgcgctgatcggtatcagcgaatcatgcagatgtgacctgtcacactgatccttgcagcggttggggatcgcaacgatagcaacggtgttgatagcgttggccggacaaacatagtagagtaaacattaaaaacaagagtgcgggacaggtcgaagtagagaatgtaattcctacaacctaggacatcgggctaagctgggtatccatattcaagtcattcttttattcttttactattcttagcgtcaggcgctaatacccactcttggtctatcgggctatcgcgatatcaacccaccgcttctctgtccccgcgtctcaaaacaaacgcctcctctcgatcttacacttcatttacttaccttctggagattttcattcggatttacgccactgcacgtgcctactccctgaatctatgaattgagtggatatctttggtacctcagcttctatggaggggagcgcgaatgtcgcaatcgctttaccaacaacaggataacacatcctacatgcgattttcaactgtctctcactgctcagcataggaaattttctctcatttaattctaaacattacgatcttgtctttcccgtcactcgttatcttgctactccaacgttccttctgcgacaaaccccggcgcatttcatttgtttatcgcacacggtagcgcttgcccaacatcttctcgcattctgcacttgcattgcaagtgcaccaccattcgctatggcgactatcgcacctccctcccgnnnnnnnnnnnnnnnnnnnnnnnnnnnnnnnnnnnnnnnnnnnnnnnnnnnnnnnnnnnnnnnnnnnnnnnnnnnnnnnnnnnnnnnnnnnnnnnnnnnnnnnnnnnnnnnnnnnnnnnnnnnnnnnnnnnnnnnnnnnnnnnnnnnnnnnnnnnnnnnnnnnnnnnnnnnnnnnnnnnnnnnnnnnnnnnnnnnnnnnnnnnnnnnnnnnnnnnnnnnnnnnnnnnnnnnnnnnnnnnnnnnnnnnnnnnnnnnnnnnnnnnnnnnnnnnnnnnnnnnnnnnnnnnnnnnnnnnnnnnnnnnnnnnnnnnnnnnnnnnnnnnnnnnnnnnnnnnnnnnnnnnnnnnnnnnnnnnnnnnnnnnnnnnnnnnnnnnnnnnnnnnnnnnnnnnnnnnnnnnnnnnnnnnnnnnnnnnnnnnnnnnnnnnnnnnnnnnnnnnnnnnnnnnnnnnnnnnnnnnnnnnnnnnnnnnnnnnnnnnnnnnnnnnnnnnnnnnnnnnnnnnnnnnnnnnnnnnnnnnnnnnnnnnnnnnnnnnnnnnnnnnnnnnnnnnnnnnnnnnnnnnnnnnnnnnnnnnnnnnnnnnnnnnnnnnnnnnnnnnnnnnnnnnnnnnnnnnnnnnnnnnnnnnnnnnnnnnnnnnnnnnnnnnnnnnnnnnnnnnnnnnnnnnnnnnnnnnnnnnnnnnnnnnnnnnnnnnnnnnnnnnnnnnnnnnnnnnnnnnnnnnnnnnnnnnnnnnnnnnnnnnnnnnnnnnnnnnnnnnnnnnnnnnnnnnnnnnnnnnnnnnnnnnnnnnnnnnnnnnnnnnnnnnnnnnnnnnnnnnnnnnnnnnnnnnnnnnnnnnnnnnnnnnnnnnnnnnnnnnnnnnnnnnnnnnnnnnnnnnnnnnnnnnnnnnnnnnnnnnnnnnnnnnnnnnnnnnnnnnnnnnnnnnnnnnnnnnnnnnnnnnnnnnnnnnnnnnnnnnnnnnnnnnnnnnnnnnnnnnnnnnnnnnnnnnnnnnnnnnnnnnnnnnnnnnnnnnnnnnnnnnnnnnnnnnnnnnnnnnnnnnnnnnnnnnnnnnnnnnnnnnnnnnnnnnnnnnnnnnnnnnnnnnnnnnnnnnnnnnnnnnnnnnnnnnnnnnnnnnnnnnnnnnnnnnnnnnnnnnnnnnnnnnnnnnnnnnnnnnnnnnnnnnnnnnnnnnnnnnnnnnnnnnnnnnnnnnnnnnnnnnnnnnnnnnnnnnnnnnnnnnnnnnnnnnnnnnnnnnnnnnnnnnnnnnnnnnnnnnnnnnnnnnnnnnnnnnnnnnnnnnnnnnnnnnnnnnnnnnnnnnnnnnnnnnnnnnnnnnnnnnnnnnnnnnnnnnnnnnnnnnnnnnnnnnnnnnnnnnnnnnnnnnnnnnnnnnnnnnnnnnnnnnnnnnnnnnnnnnnnnnnnnnnnnnnnnnnnnnnnnnnnnnnnnnnnnnnnnnnnnnnnnnnnnnnnnnnnnnnnnnnnnnnnnnnnnnnnnnnnnnnnnnnnnnnnnnnnnnnnnnnnnnnnnnnnnnnnnnnnnnnnnnnnnnnnnnnnnnnnnnnnnnnnnnnnnnnnnnnnnnnnnnnnnnnnnnnnnnnnnnnnnnnnnnnnnnnnnnnnnnnnnnnnnnnnnnnnnnnnnnnnnnnnnnnnnnnnnnnnnnnnnnnnnnnnnnnnnnnnnnnnnnnnnnnnnnnnnnnnnnnnnnnnnnnnnnnnnnnnnnnnnnnnnnnnnnnnnnnnnnnnnnnnnnnnnnnnnnnnnnnnnnnnnnnnnnnnnnnnnnnnnnnnnnnnnnnnnnnnnnnnnnnnnnnnnnnnnnnnnnnnnnnnnnnnnnnnnnnnnnnnnnnnnnnnnnnnttctgatgctcacggtgacagtgaagaccacgtggatactggagactctgatgctcacggtgacagtgaagaccacgtggacactggagactctgatgcctgcaggcctaccgaggaccacgtcgaccctggacattctgatgctcacagtgacagtgaagaccacatggatactggagactctgatgctcacagtgacagtgaagaccatatggatactggagactctgatgcctatagtgataccgatatcgatgcagaccacctagaccccgactattctgagcattcggctactagggcccagccaaaacagaaatcatccagtgcatgcctctgcatcgagagcggctttacacctcacctcctttgtcttctccagggaaagcgacagcctagtagcgatatcctaaatgctgatcaagatcagtcccacgatgcgaatactacacgaatcaagccgcaactctttgagaaaattgctggccgtggtacacaatactgggcactttcccccgagaatttctgtcggacccatgctcgactcctcgccagtggaatcgggctccgcagtaagccgaataatcaaaaactcttcagccgcttacaatatatcttcgagcacctggagagccttgcccatatcaagagtgacccgacatgtgagcagtggaagtggttccaacaggcggctcggacccctagtcccactgctgcacatggggtctttaaatacccagtcgaaatgcctaagcctcgcatcgaccagtttgccgcgagtggcatgactgcagacgagatctatacccgggtaatcggtccccccccgacggctcccatcgcagacttatgggatgccgatggctcagtggtcattcctctcttccgctggcttggtgagaagaaactgcttggctgtacccatagcgccgatgtcccctgtgagcataccggcggtctctggtcgatgattgacttggaattcgacatgtatgagcaccaccgggcccagggcgagaatcccgccgaagaaagtgtgaccagcatgggatggctccggtgtatgtggcacggtctgatccagcagctcatccgccaggatcccgcatactatgccttttatgttctccttcgcccagatcatgcgtggcgcctgatctcggtcccgtggtactcgaaaagtaccagtgccggagcccagaccgcatttcggcacctcgatatcaatatcccccgctatctcagccggggtcggagtgctaacatcatacagggcgcggtcaccctgagcgacgaggacccggcgaattgtaccgagctcctccttggcatgcaccgccagggactcttgcagcagtggtgggaacgggtcgagcagcgcggcctctccaaccagaatgtcgttcatcgcatcgccagtgggatgtggactgccgctgatgaggccgattttggcctcacgtggcagcgccaggtctgtcaccgaggggatgcgcgcatctcgcgcccggagctcccctatggctcaaccggcccggccacccaagtccgacgtaccgtcctcccatggtttattggcattggcgaagaccatgagcagctggatactcacgatgccggtacgtggtctgctgtcgctgcgtcgcatcgcgatctcatccccgccgagagaggtacccctggatttactagcgtccaccgcggagctgtgccatatgcattcccgggcgcggtccacctccagggacttggtgcgatctccgatgcgctggttggacgccgccgatggaccaataccagtgtcatttccgagctggacgttctctttggggccgatacccatgcagccgaggtctttatccagcaatggcgccagcgagcagcgcaggcatttcttactactttccaagaggtccagagactagaggtcttatactatggagtaaactccttttttcgcctccggggactagtataattttatatggccgactaagaattcatataggcttagggtgtgatttacttctatatatatcgtagataaggaatttcagtagtaattcatttcttctataggattcatttctagtacagcttttaactttgatcattggcaccacgtaacaggattgatagaggcttattcggggcgctttacggaccgctcacaggggcgcaggtagcgattatcccacagtatcgcttaacggagctcccgctcgcttacaccaactgtttcagcgattgtacggcagaccaagcgccagtgttcgtgggagatggcagagttcgatatctgggttcggcgaagcatgtctgaagcaagctcgcggcttcccagaggcgggatcggtagacaaatggtcctgtcccacagtcgggatataagtgatattcttcggggctcacaggcatcttcgtccagtcagtatatatatatatatatatatatacagtgaagtcacaggagagtgtagagaaaaaagaaggaggtaatttatagggcaaagacataaaccgaaatgaaaagccacggtttgtcttgcgaaaaaagagagaaagagagaaagaaatgaggttgagaatcaatggtgcaggcttggttgtcttagaaactggtggtcgttgcacggtccttgtatgaaaactatgaaagagattcatattcaaaagtgccagctcgttgtctcttatttgcctggtcgattgccagccattatctcgtcgcgttatactacgtagtataaacttgaaaactcccctatagaatgggtggatgtttccttgggctcttctgaaaaaaagcgaattagagctgaagtaaaattacagttataattcgttaccgctgagaaaaggctgtgaaattctttaaaaaagaaatgtgagagaatgcaggtcgcttggttttagttgttatagttacttcgtccactaccatatggagtatcagtataactttgaaatggtctgtttaggaacaacgaggttgatcattgactgaagaataagccagtctgagtccatcaactacttccaatgttttatcacgtatggattgcacataacacaattctatatctgcggctaattcctcttatactctagctacaacatcaaataaggtgtcatatcttttgtaaaaaaatcccttggaagaccaccataccataaagaacattaagcaagagtaccaaaagagaataccaaaaagacatgacaaggactagtaaatgcttgtaggagtttgggttgagataaggttatgccaagagggcgacgagtgggactgggatcacgtggtattgagataccaagctaggatatgatacgataatctgggcagctctctaacatcccccttcttggtgaactacttagaaaagtcaagggcttgaaagcttgattgaatgttgaatgtgctttgttgaataaggtgaaagctgcaatatgtctgtacaacgccattccctaacccgaaatccaagccttccgcccaaaacgtaattccatgtccgaaagagcagaggatcaaatgcgataatgcgccatattcttcttgatctcatccacaatctccacagcttcattggtactccttgcctcaaagtcataacgcttctgctccgtggcatcattgccgcgcacaatcatcacgcggaagctcttggggtgccgtcggctgaccttagatccgatcacgtcactgaagctgatcgatcgggtcttaccgccggacgccgttttgcccgtatcaccgggcacgatatgcatataatcattctcaaacgtgaggatgcgatggttggatgctgtgaaagacatgggctgtttgcggaacacgtggtatcggcggtaataaccgcctaggtggtcttgcttctgagaagatgagggcaacatgcgctgcgcacccttcttggcctcctttttgctcttcttagaagttgtcgggtctgcggtgtccaccatcaaaggcgcatttggcgatgagctgcctggcgaggttccgagtgcgagaggcccgccgccgaagcgacggcgcaccagatcaaggtcggtgatgttgcccaatgcctccactgtgcggtcaagtggtgcaatcgtgttcgaccccatcacctttaagaggtagttgcccttatcctggccccatcttttacatacagaatccagaatctctgctatatagctatcggtagatgtgttgatggtcatgacatgtgcggaagcctccatgttgatgaaacgaatcttcaatgtcttggatacaccaagtcggggagtcgcatgcgagataggtaccaccgggcgatcggcaggggtaagagtgctgtggttgagtgcagacgagaatggctggcctaggatagggtttgttcggcctggtgtggcctgagggctctttttctgtgcagtggattgcgcccctggtactgcaagattagccggctgatctgcctcttccaacccaatgcttgaactaaattggggatgtagccgttcattctcctcaaactcggagttcgatgcttcaaccagtgcgaattcatcatatggcttgccccttgaccgtcctcgggacttggcagattggttattgtttgacgtaaaatccgtcattggaagtgtccgcccaagcgctgggaagtcatactcgacttcgccatcatcgaccatccgtagcgtccatcggttcacggtcaagttctcgcgattaattggtggaccgcgaccgtcggccgcatatttccatagggcaagaccaatcgtctcagcaacggtcacttgtgcgggctgttctgcaagcttagattcgcgtgtaagtgacagatcgagcgggtcttcggggtcgcttgaaaaaggaacgtagatcttcaaatataatgagtcctcttgacctcgcccagagagcaccacgaatttatccactggattgcttggtgctcgcttccgcgacgtaagctggctggtcaataagctgaccggcttgaccatgctgataggtcgtggcgggggaagatcttgcaatacaggagccggattgcgatgcttgcgcggtgaattattctgcggccctgtgccagagggtaacttattcatcatagccatgggcgaggacaaattcaaaccgcccgccacgcctgccagcagcaaggagccagacccagccgtattgtcaaaatcagatgaaagtgcagaaccaacaaactcggcaccagagtcctcgtcctcctcgtggagttctccgagagctaggctctccgcgcctcgactgccagttcgctcgcgccgtctgcggggatactcgacgacctgatcactcgcggagaattgaacctgtccttgtttgtagcctctaagttcggtttcgttatccgtcgacagatcactgctcgtggttgtatctccacgggggcgtggtttcaattgactgaactgactcgcaacgttttgtgttgatgcagatgttaccatcacttctggccgttccctccggaccccagaacggattggagaggagtcggcgcgatctcgatggatgggcatcttgtcaaatttgatctgatcaatagcactgttgttgtcagatagggaagtagaataccacacaataattcaccaacctgctaacgtctccaacgttgtccccatcgtcgtcgctgtcatcactcagatcgctgctatcgtcgtcctctgcttgcgcttgtctctgaacctcttgttgcctttcccgtcgagttttcttctttccgcctcgtgcatgattccgccgcgcggtcatatccgtatggcttttgccggtcaccatgccaccatcatcctcgccgtcttccaggccgaggccttgcaaattgtggtgctgaggtttcgcatttcgttccgctagcctgtaatattcagatgaaacgtttgccgtggttggaatcggtggggagtaagtgcgcttcagggaggagctatgtgtgttcgggtacgcagcggcggttgaccagcccgccgcgcggaaacccggtggannnnnnnnnnnnnnnnnnnnnnnnnnnnnnnnnnnnnnnnnnnnnnnnnnnnnnnnnnnnnnnnnnnnnnnnnnnnnnnnnnnnnnnnnnnnnnnnnnnnnnnnnnnnnnnnnnnnnnnnnnnnnnnnnnnnnnnnnnnnnnnnnnnnnnnnnnnnnnnnnnnnnnnnnnnnnnnnnnnnnnnnnnnnnnnnnnnnnnnnnnnnnnnnnnnnnnnnnnnnnnnnnnnnntgtcgggggggggggggggggggccccggcccgccgcgcgaaagccaggtgtattcagcacggagtcattgacgttgataagtcggtccccgattccatctttgattgttgagagataagaggagcgtaattgccagatcgtaaagcttcactcgggttagtccttggagacccttccgcggcgatttgagggccagtctacgattccggacgcgacttactcttcattgtgaagaagagacattttccaggctctcacgaggacatacgtctgtaataacccaggggtatgctgcgcagtagcgaccgaggtctagatatctcacagcagctctagctaaaagcgcatgctcggggaataaagggagggaaagcgaatgagactagctcatacaggaccagcctggaaaaaacagataaaagagataaagagatcaggaaaggagagcaaggagggagagaaaggagagttgtatgtcggaagcaagatgagagggaacttcggtgttcgcattcatttccccgccaagggggccacactagtcaactacatcgatgtttacatctccgtacaggtacaacacttgacgaatcaattattatacacatggttatactctcagtcttgaggaatattgagaaatctgttggcggaacatatcatagtactatgctggactactctgcctcaatggctgacgatatgacaacaagcattgagattcaaatcgaacaagactaaactctttgaacatcatcaaaagtgtacctagaaagaaaacacgacactctctccaatacctgtgagtttatcagccgctgccaatgcatccttccactgatccagaccaaattggccagcaacatagcatccgtcctcttctttcaggcgaagattccccctctcgatcatcttgatcaatgcaagaacatcctttcgctcatacatccagtttcccttcaatgtgatattagaacgtgtaacaaagacatttgggatctcaagctcttcataggcacccatcagactcacccggcctccaggtctgagcgacataatgccggatttgagatggaaagatcctcgagccccaggaggagaaatgtcgaggaatacatccatcggaccgaatttgctgatgttgtaggcatcattcgtgcggttgcctgtccaggttaccgtggagattctttcgcaagaaccgttgaaagtgcatgataggatctgattgagacgcatgagcttagcatcatcgtgagaccaggctacaacttttgcacctgatattcagttagccaaactcctgattgtctggggatatctttggtagctaaagagagatattacccatagccaaagcaaccatgcatgcagcaacgccgtttggataagtggccggagaaatcaacacggtttcaccgggcttcacgtcaatgctactcagtccaccgaaaggcctgaggaatgtcgcaatagcacaaagttgttctggggtataattaaagccccaattagtcggatctcccatcaacttaccttcatccaatggatagcaattctcaagtggtgccctcatgaactcggcatatgagccatctgcaaacccgctataggccatgatttccttgatttgagagtcaaatccatgatacacggggttggaaaatcgaaccatctccgggttatctcttcctttcatgaccgagtcaaagaagatcagttgaccaaccttcagagtggttgcatcgtcaccgacctggctcacacgggcaattgcacttgagccgggaataatcgggatttcataaggagatctgaaatggttgtaaaaatcaaaacctagcttactaaaagagtggaggggcgttgccaggatacgcagaagaacacttccgggcagtagagacggcatagggacttgttcaacttggggttcggtaaatggagcaggccttagaacgagggcacgatgggtgctttgaaccaacggaagaagctttctgtgcgggatgattggacgtggagtgtctggagaatctgtagacagacagttcagtgtttatactcatgattggcgagaatacttgacgtacttgttgtgacattgtcagagtcactagattcagagacacgagtcatatttgcatgcaggaacaggtctgcacagaagaagagtcgagatagcaagagctgagataaaagaagtggaagggtttgaaggcattcacgaggggataggaatagcgggaaagcagcgagagaagaaaacaagtcctaagacacgtcaaaatgtaaacaactaaattggtgtactcagagacagcagattaaaatgcaccaacactattgaaacgcgtgctccttgacgaaacgataatatgttacaaaaatgagaatctctcaagccttggccttggccctactcttacgagctttcttcggcttttcctcatcggcatcgacgtcaccatcggtcttcttcgtcttcttgcccttggccggtgccttctttttcttaggcaagctcacatacttgtccttcttcaggtcaagttcttcgtcctcatccttgatctcttcaacaacttcttcttcgtcggatgcttcaagggcatcttcaatatcaggcttgtccttcttccccaccttgggtgccacaacattgctggccttcatgaatggcatcgggtgcgaacgcgagttgtacagacgcgtgaaggtagctttcgtctgtgtctcaagtttgatcttagactcgtccattgggcctagtcctagttcaaccatggaatcaaagtcctctcgagtgagatagtattcatccatgagatcaatgaccgactcgacacagtccttgccttcgtccatcattcggcgtatcatcttctcctggagcaagggcatgtactgttgacggatctcgtcgcgattacctgtagtacgaagacgcatgtggccctgtatttccttgacgtatcgggagagtttgcctgaagaataaatcagttagagagtgtactatacagagaataggggaatgtccaaaacataccatgtttgctattgttgcccagccagctagtaaatgcaggccgcccatttaagtttccgtactggaagctggctggccgcacaaagctgaagatcgcatgagtgggcataagactccattgctgctgggtgccgtggatcatgcggtcgacgaggtcgccatcgctgatactcgaagcggcattgtccatcaattcaagcgctttcagtcgctgttcctcgccctgatatttgcccacaagagcaggtttagttctgaggtagttctcctgaagcatcaggtagctgaactcatgatcgttaaaataaagctcgatcttgtcattcagggtagcagtggaactcggggaaaacatctgggcgctgagaattttgctgacaatatcccacggcttgagaatgatattcttctcccacgactttgacatttgcttcccttcatcgtaattaagacccttttgatccagtcttgctgtggaaagcatgttgatgacctggcggatatcggcatgtgttccctcaatgaggccgtcgagtacaggaggcggaatcttaaggccttctcggaaacagatagtggacagtcttgcccgaatttgctcagcagtcgggcgtctgaatggcacgtcataggtgatgaagtcgaaaggtttcatctttggaagctttcgctcattgcagatgaggatgatcggaatcttggtcttcttgacaatggctgcgacagctcccacacctccgcgatcaccggcagacatgccatcaacctcgtccatgataagtacgagctttttcttttcactatcgacttgcttgccttgtccggcgaaatatccttgcaatgatgttgtatctagcacacccaaggtagagctctcgacaagcttcttacttctggtgtcactggcattggtctccacgatatcgaatccttccagcttcgccacgagatgggctgctgtagttttgccgattcctggaggaccgtgaataatgacggcacggtatatccccgagccgtctttgccgccttttttgaaatcggcctgggcattggtatgccagtcccgcaaccaggtctgaatcttttccacagcactcttattgccacagatcatactggtcgatgttggggcatacttcgtggtccagagatcaccagatattgcgggctgtgagcttggtggcgtctgagacccggtggccgaggtcttggatgcttgagccgcggccgtctttcgtttttgctcatctcgtttcttctcctctgcatcaatttcggccgccatagcacggaccttggcctcgtcggctttcactttctcggcatgcttttcggcagcctttccatccccgccgttggcagggagtcgtcgaatcaattcgaagagaccatcctcgttgatggtcttgatcttgtgcttcgcaattgtctcaagcttctttgggccggcatcagatccgagaactacatagttcgtcttagaactaggagcccccacgactttgccaccatacttcttcaccaattgcgcaccctcttcacgacccagggattccaaaataccggtgaaaacaaaggccaaaccagcaaggcagttttcttctccaacgggcatctccttagtcccagccattgccggttcccggctttgttgtgctccaaatttgaatttccttggctctccctcaggaggctctggggcgtcaatcgtaggaatgctgtcgaaaatatcttggagctctttgctctctggtttttcctcctttttggcctttttagggctagccttctgcttcttcgcagctgatgctgccgcggctttggttttcggagctgcctttttcgtttcctttttgggttcttggtagtcgtcttcatcctcgtcgatgagagcttccgatttgcgcttgcgaccaggtcgagccttcggggtaggaattttggggagatcttccatgaccacgtcatcctcgtcatcgcgagaaggttgcttcttctgtgccttcttcaatcctgcagtgactggccttacctcaagcatttcgaagtcactgccatcgtcattatcatcctcagccacataatcatcgtctcctttgccggcttttccatattcggttgcaaaaatgtcatcggcgccaagattttcatcctcaaggacctttgtgggtttctttgttgataccttagtggtggttcgtactttgttcgcaggttcttcggcagtcttcttgggtttgggattttcggccacaatcttggctttatcggactgaacttgctcagttggttttgtaggccgtggtttcttcttattggaggcgaaatagtcggaggaagttgtaggttcttctttagtctcttcgggctttctgtagaggaagctcatcagtcaaatggtatgagacatttcaatccagcgatggacatacgattgacttttggactttgctttgatagcgggcgctttggttggtgctacatcttcttcgtcactgtcatccacaatctttctgctgcctgttttcgcgttagactggtagtgcaggactatgggttatggagagcatacgtctctttcttgtggcagaggagtcctgcattgtcggatttgaggttagactataatttcaagcaatacgaagggcaccagtacacatataaagtaaccaggccctcctttcgtgagcaaggcaccagcttacctcttttttagctgcgggtttcgtagcggcgtcgttggagccttgactcgacttgccaccaaagaaattccggatgtccatactgagtcgcaattaatgacacggaatttggcacagaacagtaaatgaaagcgcggtgtatggccaatcgagctcttgccgcagcgtttgctagatcgcgaacgacgcgccacacttccggggacgtgactggctgacgtaaggcagcacttccttccattttaggactagcgtatataagctaagactacttactaactataagaatcaggaaaggactccaaggcctcattagcactccttacctcaaagtcataaacgcttcaggcatgagatgtttgtatatagtgtcattggtgccgagagatatatatcggatagcaccggctgtgcataacatatcaaactattacaggacaagacaagaggattaccagtcagacatattacatatccatagtttcaattatcgagttgcgcagcgcggactttctttagtatgattgagtgcatcttccatcaataaatagctatttggagctacaacgtactatgttagaatataattagactgaaattgaggcctggttttcaaggcataatttagcaagtatggataatgtcacgtgctctgtgtctttccactttgggactagtgtaaatcatcgaaaagtgccggagtaacgaagcctttcgcaacattggtatctctcgccgcctccctcctcacaatgggtccccagatcaagatgtttgctggaccgctttccgcctgcacacggccaactcgtatgagccatttaacccccataaaatccattcggccgaagactaacagtgcgacatagtgtcgggaccgctggccaccttttctctatcacgatgcttctctaccacctcgcccacccttgattggctgaccccgaaattccaagaaaaatccaaatcccccaagggtcgccctcacgttgctaccggcggatccacccgaggaacaacagtcgtgtggggagacttcggtctgcgcatgaaagaccacgaccgccgcatgcccgcatcggcgttgaagatcgccgaagagaccatcaagcgacggcttcgaggaatgaactataagctgtacaagcgtgtcagcgccaacgttggtgtgtacaccaagggtaacgagcagcgtatgggtaagggtaagggtaagttcgactactggactgtccgactgcccgtgagccgaatcgtctttgagttgaagggagatgtccacgagaagattgcccgcgaggctttcagattggcgggccacaaattgccaggtaggttatgcattttctacattactactactagtgcgaaagatgctcattcttattcattaggtctttgggagttcgttaacaaggatgacccgcctgtcgtcggtatcacaaagctcggaaacggagtcactctcgactccctcaagcgagctcgcagagacccgcccattggtaccaatgacctcgtttcacctccgcagagcacctcatccagctccgactctacacaataaactgccgcttcctgcatgataccgttttctcttttttcatcggtcatgtcttttgcttttgtcgtctttgccgactaagccccgacaccagagccaggcccatacccctgctgtctgcgggccttggacacggcatcgtcctcgtcacgtttcatatcttttgtacattatcatcagctgtttgcgtctctttaggagccgtcgaggcacgggctcctctgatggatcttttgtcttgatactaggagtttagacaaggaaaatatattcaggatttacctttaccggggtcagctaatgctcccattcctagcttctgtgcctgggcatcctcgtcgttgctggatgctggccctgggctatgtgtccctagatcagggctcgcttcgcttatagtgtgcttctggccaacttggatgaggtcagtcattgctatgcctagtgcactcagaattatctccaaggaagcgatataccccctagctgtccggtctgcttgggaggactcttagtgaattccctaatagactcatatctgcaccctgtatattagcgaatagcaattgcaagagatggtcttgattcggtccatactgagtgctctctccgcccggttccatatcaacaagtctggggtcggacattttggatgatattcgtatggaatagaggtacaatagtagaattgtattaggaaaatcagatgaatgctattccgatgttcccactgggtggtccagtttatgaatgacggggatgcgatgacgtatgttaagaggtcaactgacctacacaattcaggtttcttgatatcattgtataaaatagtatcgaatgtgctctatgtacttagaatcgaccattgctacaatacggctacagcttcgctgttgaaatatatagagctacgagttgggcacgtgtggttccagaaataaatagtcttggtgcattctttatactacaacatttagcaacattgcgcgttgaatcataatgggggatcaagcacaacatattcgaaaacgtatcatgaatcaaacccagacacaattcatagtttcctcagagaagttgattcaggaccaattcgaatactgggcgacacccccaacaccctactcgaccctggagagtatctaggatctttacgtctattcatctcaaaggcacagtgttctattcgcaatcatcgtctagacgtctaaactagttttctcgctgtggacgtataccctggaagtcacgcttacttcgtcctggacgttaacaatgtcgactatgtctatgagaccgctcataccgatacgagtcccattcacatctacgttcttcgcctatcgaagaggaaaatcagcatcaacaggcagcgacagctagacgctaccattgctaagagatttagagcgatgcacaatgggcatggggatgaccctctaccgttgcttgatgattttaatcggactgttgaatatcacagtccccgtggtcttcggcggtagatcttcaacgtgatcatctgagtttcctctatcggagtttgacccccatctgatttgatttttgttttctcaatggaagctgcaatgctgggggcgcctcagcccaaacccaaacgtgcaaccttgaagataaccatgagtgaactgtgcaatccctttgctcaagtgatacagactttagcgacgtcctgcgggtccagattccggagagtagacccccatcacgacaatccttgcgtaatttagatacagtgatatcaatctttgtaagcaataccgggagtccgtgacttgcagtattaaatgaaatgtgatataacgccagaatccttttcaaaaatgccttcacgcgcctggaaaaaagtgaaaagtaaattgcatacctggggatttcgaaaaaagtgcagttctgcataatagcagaccataacttccgagatcccatgctcaccgaaaaccaccttagtgtacaaatcgtcattcatccattgtcttggtttgttgacagtgagtaattagaaatccatgcccatcagatagctaaagtgctattagttatatgcctccattaaattatccaggggaagtatacctttcatagatgcgcatgaacttggccacgaaggcttcgagatggaagattattttctgtatcgaaatattcattagcttatattgatggcaatgctaaccatcaataacttacacttcccagcttgatgcggtgctcatagaacgcagaccacttgataacttctggtttcagagcatcgtcaactcgtgcaacaagcttgaatgtcaaggtctagcaccagcagttaatatctggagcatgttcattgaataggtgtatacacaccttcaaaatagttgttggggggatgcaatgggtcagaagatcataaagacgtgcgcggacttgcaacagccgagctggtgaacgctcagccataatctcatcagccgttagggcaacaagggcttcccagtccggaggcgggatgagggtcttgtctgtaaccttttcactacatttccaagaaaacgtaagcttctaaaatccaggccaatgggaaccgaagtagaaactcacttttgcgcataaatagactcaaacatgagcagcgcacgacgcagattgcgtccactctccttcgcaatcctcttgttcagcacctgagactcggtccatccttccttttttcctgcgagatggagcgcagagcaaatgtcagcttcagttggcgctgcaaccctgaccagcagggttcgagaccgaatcggtgcaatgatattggaggtactgttggccaggagaatcaatcgtagattgggactgtatttctccatggtacgtctgagagctgcctgggcatctcgtgtgagatgatcggcttcgttaatcacgacgaccttgaaccgctgcttcgcgccgagatccacctgttgcgtctgcgcgacctctttaagcaattcctgaacgactactcggtcatagtttccgacatctgcgggggtgatctcgagatggtacaccgatgagacaatattgaactctagctttcggttgctcgtcgtttggaagactctggcgtcgatcttgatcttctcgacaccggggccgtacagttcttttagtgttgcaatgacccgtgttttcttgccagcgccggagggtccatagactagtagatggggaaaatctccgctttgtgcctgttaggggtaccttatgttaaaattgtgtcctgttccgcagctcagactttcttaccagtgaccgcaggcgatcagagagctcggggtggtatgtgagagcatcgagggtgcgtggccgtagtttatccacaaggagagccattttgaaaactctgtaaagctgttgagatgaggaatcgaggtgcttgtggtttggatagaggatgcggacctgagaacgcgtccagacacgcgcctaattaatcactggtccgtgcacgctcccactataatcagcttcgaagaaatgatttcgacgtagatcgtacaattacatatgaataaatttaacgatatatacagctatatagttttctaggcatttggcagccttccgccaaactccgatatgtatagtacatgcaaatttgctttgagagatgagatgaatgttgaaaaagcccgacacaacaccacgcatgtttctttgttcactgttaatgtccaagcctatacaaaccaacacagttgaaatacagtaccccaatgcgcccttggtgtgagctttttatgatgcaattggcgtcagaacaccattgtcatcatatttagcttctgcgttgggttagatcaggccaagaaagcaacgagtagacaataaaacttactgaagaaggtgtatgacagggtgatagtatcaatgcccttcatattagggtcggtagcaaagtcgggatcgatgaagaagaagacaggcatatcaaccgactctcccgcattgagcttctgctcctcaaagcagaagcattgaatcttgctaaagtacggcgcaacctgacctggcgtgacgctgtatgttgcaactccaataatatcctgaggacccttattcgttgcggtatagaatgccagcgccgtctcgccgggcagcactcggacttcacgctgctggggagtgaacttccaagggaggacatccgataccgagccgttgaatgtaatgcgcaggcgacgagaatctgtcaccggcgtcacacgtgcagaggtatcaccgtcgccgattcggtgggtgagaatgggctgaccgccccaaccggtctgctggcaaatctgcaagtgggatcagaatgatattccgtttatgatgtactctagatcgagggagagcttgtcataccattttgtagagagggacagatccatatgcaagggcaaccgttccaaggatcatactgatggtatagtacctgatcgggggttttgttagcacatggattccctccggtccgggttaaatggcagctcacaatgtagagttattgcgtttttgtgattccggggtattgaaaggcgctgtagatgaattgcgttgttcatgaagcaggaaattcttcgagaaataccttcgctccacctcgaagacgctctttcggagatggattgatcgctgtggaattgttaccgtcagcgcagagcgccccagcgagggggttaatcgtgaaaacatggttctatgactttaatgggattggacgttgagtcgcatgagatgcagagtatccaacacgtgataattctgattcaacgccttatcgataaggccttaagcttcggagtcacgttacatttaaacggcgggcgacattgagacaaggttagaaattagaatgtatgtgtatcttaaattgattcttgatttgttcatgaagattaaccgaatcaagaattttaattagaaggttcgaccgcacccttccggctgccgaggctgcagagttggctttagcagcgactcattactggtatagaggcataaacattattcgccttattcgccttgtacaaaagatatcattaagttcgggaaatttgaaagcattcatatgtaatgatgcagagttcataaaaataatacagggtaatggcacccagaagttagacccgaagtataaaataaccaataactaatacaaccgtttgatggcatcgaagcatttcactggaagtctaattcaacacactcgacgtgatgcgaccaaacacccctcgtaccatgctaggtcgctcacggaggcaagtgataagaacagcagcgctaacagcaaatgcgatgcgctctcggtattgatactgggaaacacaacacgcgtcagcatctcgtgattgttttggaacatgccacaggttaattcgaagacattaagaaggagttggaggggatgtgggtgtaaccctgttgtgaacagatgatgcgagggtccgatacatacctttttctcatacaaccgtggcaaaaccgtggcggcagcccggggtgccacaaatagcgccaactcctgcctcttccgcgtcttttcaaccaatatactccagccgcacatgagacatcccgcaccgacacatagcccagagtcccacatcatcggagtgaccgtcttcgcgtcaaagaccttggggccgagtcgtgtccgagcgagacagacaccgtagtaaaataagctcacaaaagatgcgaggaaggcagatgagcgtgctgcatcagaaagggcccgacgaagggcatttgcagatttcatcctgcgcaggcggaaaataatctgtaggggtatataggttgcacaggcatatttgaaggttctggcaaatcgatacaatgcgtgtttttcacagctggggccacagcccatgtgaaccatttcgcaagggatcgggacaaattttgatgggtcaccccatacctctggccagttgtaatcattgcacatcgactggagaagaggtgcctggcctgtatcctttccatagacgaaaactcctcgtcgagcacggcgcaaggcttcaattaaacgtgagtcgacctgagcagcttccccgatccacttctcataggctctgggcagtctttcggggagataaaaccacgcccacatgaccacagccgcactcatggcaaagacagttgcgtcggcgaagccagggacaagggattcgacagtcgtccagcgattctgggctcggcggcgacgggaccagcgaccccatgcaacacatgcgagcgcatctacggctcttgtgaccatgtagatggtgaggtccattgtcctccctgctaactctgggcggtgatgttccagcgaattggccataagctgactggagtcttccccctgatctgtggagttccggatagttctaacatcttctactggcagacagatgcggttcttgttgagcagttgaaaactgaaccatccagatagaagagagatgatgaatctaattaagcggtccagcctttgtgagatccgaacgtcacgcttggacagacctgccgtgatcaatgcacacagacgatataatcctattggtagtagggttgagccaccgaccagggaagcacaagctgttgggaaactgttcagacgtaaaggactagccaagactttagctaactattcgaggtgaggtcagctatagcattccgtttgtacaatagactagaggcaagggtgacaagataagtcgcgataagagccccatactaggtaatactacgacgtacctcttgaagtttctgttgcgcagtccaatcgttattgcgcagtcggcggacataagacaacaatttcggggtgacagaagataggtacccgagtgcatatgcgcgaaggaggctacagtcgtaatcagcaagggctcttcagatcacacagttgcaccaagccacaagggtaacagatcgcatggactcacggcttgaatatccggacgttgtcccttccatggcgtctccggagtgcaggttccatgctgccggaaaccttcatgtcatgatccgtcgggaggtgtcaacatcacagtcccccggactaatcggcgacgaggggtcagccagctgtaaactctggtgggattcacaagaatctcctcgccaattagggaatgaggtataagagctcaatgggttttatccgcgggtgacctacaattgcacctcccgaaaattgggtagtattctccaacagggggaaattgacacctacacgaccgttttctgaactatggatcaagtgaactccgtgtaatgagcctgttagagacttggtggttgtacctcggtccgtacccaggtgggaactccagaaaagcccccgcaaacaagatccaaaatcgggggagggacctgtttcaagagaagacagagggcgatcatccgaagcaatgagccttttccctttcggagcagattagtcggtattgcggggctaaacaaggcgaatgatctaactccaaccccataataagaggatgatctcaggagaacaattcccaaacaaggagatgaaccgcactgacccaatgatccttgtcaataagaacgagagaaaggaatatataagagaaagggcaaattgtattcgaatgtacaccagaaaacagctggaagagagggtatctgcagtgtactttgcgttgacaagtcggtgcttctctcgcagggccctcgggaagggttctccgggagtcaacagctctccccaggaacgtatcaaataccgatggtaccatataagccacagcggaaccgccgtaatttatgtactgttacgtcacgcgctcaaatttttgcatgtgatcaggccgattgcttttgatgcgaaactctccacgtattcttctataggacgcatctctcttgctttcgggcactctcttgatcttcttcttttgctttctttcttcgcactttcttctggtcttcttgttcctatccccattgcgctgaaccatctccttatcgagtcgcattatcagccctagagaactcccgtggccttgatctacccccgcgttcctcttttgtggagtcaaaccttggctatcatctcgagcgcatacaatttttcactccattccaaggcatgacagtgtcgccttggtccgcgctactctttccatcagagtagcaaccgttttcttgacaccctgtgaatattgaaccgcttttcactatgaatggacatggcactcaagttcggactgggcgcacgtctcccccggctgctccctttggatgtgagtcgctccgggcattatttgtaccgtccactctttaacccgattccagactcgtttctctcccccatggacacaccctttgaacaggcacctgctctacccccgggaccttctcttcttgacgataacgaatccaatatgcttgataacttctttactaccatgaacgcaaaccactttacgaatgatttctggatgcgacaagaacataaatccgggacacccaactttgactggtcaggtgagctgccgcccaacttcgaaggatcaaccacatccctatcgcagccctcatttcagcagcatgggctagggaaagcagccgggggaatcataacagacaatcctacaagctcggatatattcgccgcagcttccatgctctaccacagtggtctgaacggatcggagttaggatccacgttagcacaacaggctttcgcgggacagtctctccccacccatgggatacaacgaaaaattaattcacatactggcagtgtcgcacagggttcagcttcatctccaccccgggctggtgtcccggttggatatcatacctcggagatgttttttgacgtccgtgaccccattcctgcggaccaacatccatcaagaaaggcccgcagtttgcgatggggctcagatgccagttttatggaccagggctatcttcgcccccctgatcagcctgacgaggaacagcggacaagtgacctgctcgatcatctcgggtgctttgaaccacaaagcagtgcagcaaacacacgagcacctagtccagagcgcatggttggggctcctcctcaaggtgccgttttccgaagtggagctgtcctggacgagagcttacatccccgaaaacggccaagaaccgccctgaaatatgagggtgacgaagactccgatgaggatgatgcacgacctcactcaagaaagtctagaggatctatcagccaaggccgacgagcatcaacggacatgtctcgaaaagcccgagtacagccagggtccaaaactgcgcgagagaatctcactgaagagcaaaaacggaccaaccatatcctttcggagcagaaacgtcgaaatcttattcgccaaggcttcgaagacttgtgtacactggtccctgcgcttagaggtggcggattcagcaaaagcgcaatgctcactggagctgctgactggcttgaagaccttctccgggggaatgacatacttcaaagccaactgcgcgaattgaagggcatgaatggcttagtgatgccgcgttgataccctctgtcgcacgaccacaacgttaatatatgatctcatggatagccctgcctcttttcttcgcggggattgcaagcgtttcagcgggacagttttgtgtatgcatgtcggcgagttggcatttcatctttgcaaatcccggcaacaagataccatttttcttttctctgcatactctttcttcgtctttttttcccctataaccgctgtaggtgatacaagtcatctttcggctggtcctcggcaaatatcgataccctagtgcataattcgaaaagcctgtattgaacatagtttgagtaaagacattatttctttccaaatagttttgccaatataccaagacatagctttccgcatagcacataaatacgcacgtttggtcaagctgagacatttcagcgacaattttggattatttcagttttcatcggttttcaatttgaaaccttagtacggacgaatatgctaataaaggccaagactaccaagaccctgtgggttggcatgctatctactccgtacttccgtagtatctccatgttttgtccccaccgctctgtattgcccgcatgtgaagacgcgtcaacatccttagttttgtacctcgacctaacaccctcaactcactatgcctccaaagcgaaaacacacgggcgacgatgccccgcaggaggacgactccaagggctacgcctatctcaaaccgcacatccgccgcgtcccagagaaaaccatcaagtcgaaatgggcccctctaccggaacccgtccagggaaaggtcatggacatgttccactccctcgagcgaccggtgataatgcggaatcaaaatgagcgcaagcgaatcgaggcgcagggcgccgtgcaagcggtcgtgcgaaagtagggcgccgtgcccagtctggtagcttccacagagctaccagtgtcttgaaggacgatgatactaaccgtataccgcgtgttgtttagtctaggcaaaagactcccgcgaatgccgtttccgcccataacaaaggactccaacttcgactacgaatctgccctgaatgagcacgtatgcgaccccctgcgattgtcgacagcaagtccatactgattacattcttagcgctcactcgaggcccacttggctacgatgaatgatagcgtcgatctactaaaagctgagattgccaaagaagaagcgctccttgctagggaaacaaaatcgctccaggaaatggacaagaatgcgaaacgggccgaggctgaaaggaaacgacagactaagaatgtatgcagcagattatctcgcttcaaaatggactggctaatgttttacgaccgtaggaacaccccgtgctccgacagttggatgcacttcctcgaactgaggattctgggtcctctgagttcatgcttctcggcgcgaaagatagtcaagtgacactagatgaggtacggactgcttgtgaaccacgcgtgcttgccctgtcaacttaccattctatttgattttagttggagaccgaccccgaagtccaaggactcatgaagcaactacatggccatcttcaatccatggaaagcaatatagcgcccttcgcaggactcggggatgccatcactcgttcacaagctgccttggatctatactcgatccccaatgactgattattgctggacatcactgcacttgcaagctaccaatcccggcattttgatgcttcttatgattgacacatgaagggcctcggacccagggtatgcacatttattagaaactcaaaccaagtatcgcccaagcttggcgatcaggaatcacataggcaatcctggtcgcgtgcttaactccaatgcattcgctgaatagctgcatacggtggaaccgcacggtcgaacgcacctctgttcaacagatgataccgactgcaagggtaaaatatggatcaccctaaatcaagagaagggtaatgcagatatgttgcgcacctagtacaatctgaggagtcatgctctaagggtgatcagacaaccgaggctccaccgcatgaaaaggggaagaaactagatcaataaacacgagcctccaccttttacacaataccaatgtagtttcaatcgaaatccgatcaattgtaagcatagaaaacgcaattccgcagccgaggtggtctcgccccgacagtgacgtgtgcccaaacagccaaccccatgcggagcagttcggaggggtgactccgctttctccatccccaagaacttttcgacgtttaccaactactaccaactggtctgcaggcagccattccgctccggccctggtggttctcactgaactcttgcgcaatgtccgaaaagaatgcgccgctgggcacttccaatgcgacaaaatccagatctgatgcagggaaggatacgagcatcaagaatccgcaaacagctgcggccaaggccgaaacgaccggctcggggagtcactccagccccaagaagcgccggaaggtgaatcacggtaaggtgccgttgcgcagcatgcgacagggatctgggcgcgtccgatcctgttgcgcatcaccacaagaacattttcgctaacgcaattccagcctgtgtatattgtcgccgctcggtaagttaacttcttgggaatgttattatacttggttactatatgcgatacgccatgacatcaatgctagcgcatatctattcaaggaactggctttgctaacggggggttttgctcgcgtgggacagcatatgacctgcgactcggtacgacacctctgtctccctttccgcgttcgcgacccgtcacgtctgaaactttgatcgcaaacctgcggagaataatttgcaccagctgacctgtttaattctgaaggaacggccctgcacacgctgtataaagcgaaacatcggtcacctgtgtcatgacgagccgagggaaactgcgaaacgaggacgtggcgaacacgaacattctgctgcagacgacgagggctcgtctaacaatgaattgggctccgttcaaggcatgcctacgagtgtcgacatagccgatgctgctggtcagcaatcattccctgataccacgatcggaattgcaccctcagttgtgaatccgccttcaacggtgccgcctgggaatctttctgcgtctagtcagtcactcgaggctacctctcagcgtgagttcgcaacaaaacctgttttgccgccggactcagctaacgtggtacgatagtcatgccatacaacgattgggtaggtggtcagaatcagttccaggacatgcattctctccacccttcctacatgtttaatgcacacgaagtgaccaacgagtacaatctgctcggcgatttcctcagtaacagtctcttagacgacggggcaatgttccaaaatcaagatatgcagggaatctacaacgattcgtcgttgatgaactcgatgaatggtatgccagcaccgaacgggttgcctcctccaacacaacttccgccgccagcacagagccaagcactgccaggagactcgattcaacgctcaacctccgcgacgggtaatgacaaagcccgggaaacgtactacatgaccgccgccgacccggcaggaactgacccaccagaggagcggatgaacaagcttctcaaagcgaaatatgatgccggactactgaaaccattcaattacgttaagggatatgcacggttgaaccagtacatggaaaagaacatgcaacaaatatctcgacaaaagattctgcggcagctcgacaagttccggccgaagttccgagaacgcatgcagagcttgactgatatcgaactgattctggtggagatgtggttcgagcgcagtcttatggagtatgaccgagtctttgccagtatggctatcccagcctgctgctggcgtcgaacgggcgagatcttccgagggaataatgaaatggcacagttgattgatgtcccggttgagggtcttcgagatgtaagtttcaagactggagactcgccacgtcatattacacccaactcacatgtttactctctgtagggcaaacttgctatccacgagatcattgtcgaagaccagctggtcagttattgggaaaagttcggcgccattgccttcgacaatactcaaaaggctatgctcactagttgcacgctgaagagccctaaccccaactcaaggagtgacggtataacttgctgcttttcgtttacgatcagacgagacaatcacaacatgtacgtgttcattgctcaccactgtccactagatactgacatgccggaactaacactgtgcagcccgtctctcatcgttgggaacttcctccccatcgatagatagtacttttcggtagactgttatttattccatgacacacaaggacttctcttttggtatcatcgtttgatttagtgattccccaagttctggctgtgctcctcacagaaaaatgtatagtgcttgattttatgtgtataacatcaaacagtatgttttgagtcaaatcatatatacatacgaagtaacagggtctggtgctctgagtagtgtaaatgttctgtttgcaatggtcaagggacgacacgagcactttgggtttgactcgtcgtctctttcgtccctccacgctcttccaactccaaacaatcttccctctcactttcactttctttcttcctcttctcccaacctcttcgtaaccttcattatccccttttatctttcttttcatcttttctcccattggctcccaatccccaagtcttctctccatggcgcaaccgtctagactacacccggctctagctggtacgagccacacatcatgtccccgctatgcgcagcagctgacccccatattcttctatctaggtcatgctcacactttgcatatagccttatctacagtcggaacctcgagtcctctccttcctcccaatgccatttccagactggatagatggctcaagcgtaacccgtttgttgtcatggcaaatacatcgagtcgccagcagctggatatggttggaacattactctggaatgactgcacccatctgatcagcttgcgtggtcaaaatccggaggatatgctgattctcggcaaagtgagggctttcgcgtttgttgtgttgaacatggctgtcatgcctgacctcctaggtttttaatggcctctaatatatgttgaagtgaccttatctaacctcttacaggagacctccgggctctcgatctggccgtcaaggctgcgcgtatttgcattggtataccatcttacatctcacttgatgacttgatcaggtctaacgacaagaacagtgaaccagcaaagcgaaattgcggtaaatatcttgtcagtggcagccacgaggttgtcaaacattcagcctgctcatctcgggcttgacgctgcgattaaccgcactatcaccacccaatacttgttgctccgtatgcgactggtgagttgcattgcttgaacactgctttgtgtgtcaacaccagaattgacattatttcaggcctggttgcatgaacgagcagatatcgccgagcatttttatggcaaactccctgtcttgcataggtcgcatgatgaagagtggattttcgagacttgctttatcattggtgactctgcactcgcacggcgcctgcctgacatcgctatcacatggctgcagagagcgagcgatcacttgcagtccttacacatgatgattaagtttccatattattatgattgggacttggttattcgacattctcttggtgggtgggttgatctagttgatgacccggactaacatgctgcagttgtggcttgttcacaagtcaaaatccctctggcaaccgccatctacgattttgaaatgagctacttgagagaagtacgtttgtggtgaatgtggtagacttgaagctgacctttttagaattacccatttcaccctgctgtgatcctttttgatctatctatgggacatggcaatcctagtaatgacggggcactacaaggtaagactgatctttatcttgaatggaattgaattaacaatattgttgtagccctagagaggctggttgatggcatgacccttacagatatgaacatgccgatgtgagttatcccaattatttactgtaatttttgataaatgttaactgttgatccagaattttccaatatgcccgatctctgggtcatatagggtaccttgatacacctatcggtgagagactttgctgacagttctttagtggttcggatgacggaatggaagcacttcgaaggctgctcatgcgccctctgccagcaggagaatggacagagaaatgctttgttgcttttcttctacttttgagcagatcggacttgtctgattctacgcgtattcaggccctccaggatgtgattgactcactagagcgacgtggatatccatcttttagcagtagggcatctcacgccacattgattgtaaggcatactcaaactctcatcatcttcaattcaaggagctgactattatatacagtgcatctggaaaatgactgctggtgcaatttcccggaatgaccgctggagtgcaaggctatggcttcagttgtgcagtcagccaaagatcttccaacgctgctccctgcccatccagattgtgatacaaaagttagtggaacaagaattgagatttaactagcactgtgagctgacatatttcaggaagctggttgcttattacatagaggctggacagcttgccgacgctcgttggttaatcgatcggggtatagtccaaagccaggaagattgccaaaggatgtacttgtcttacaagttgacattgctggagggaaaaagcggtgctggtacgaatattctatcggaaaccaacgcttctggcctattctaactatatgcaagcgcatttctatctcggctttccttcgcatcccgtgccgcacaagcaactgagccttctttcgtgcgcaatggaagctcagagacaacacaaaccagaagaagtcctgaattgtcttgaaccatttatcaactgtttgacttcagatgacatttatcatcatgactttcccgccgccgaacatcacatgtgagaatgtttcatatttttgactcgctatgcaaggctaacttgcctactatgaataggtttgccattactcttctctccgaagagctatccaagggtggctttaaccagagacttggcaaatgcatcgagactgtactcgaaagtggtgcgttttcccccaggcaatagtaatttgtgatgctaatcgttcaatagccctgtcttatgccaaagaaaacagcctgtttgaaggtggcgatcgggaggtctcagtcactcaactggaatggctgtatttggcaacttacaacgttgctctgaaacttatcaactcttccggattcctgtcggctacgcatgccttagatcactccagagatgtctgtttcgaccaggcaaagtttttgcttggctatgttttactaacatcttttcagtttgcgctccagtatcgtcagattgaataccctgaggggggctccaaagcaccccggccgcatttgttttcggttatttaccttcgtctccttgttagcacacttagggcccgctgtgctgatccgactgcaaaggttagttacatcaattcttgtctacaacatattatcccccgaaaatgttgcaacgttatagtcccataatactaattgtctgcagaaaccgcactacgaggatgtatgcatttgttttcaacaactaggtgacttgcgtggttgggaagatggagaagagacagacgctggcgcaaattacaaagaagaaaagcactataatattgcccgatttttcaaccttgaggctaccatgcacctcaacaggtggcaggatgttgtcaggatatgtgcatccgatgacacgatccctgattcaaagttttacccacagatcatggatttgactctccgattgaacctaccacccacatgggcgatctggcttatcaaggttcgttgtttatttattaccgggagactacattctttgaaaaatactcacatctatacaatagcggatcgtgtcgaaactcaacgagctacgggacgatccccctaccacatggcaacacgatttccgagcctccctgcctcgttacctccactgtctattcatactagccattgaaccggacccctacgcaagcactgatagaagtgccaatcttggtttcaaaatggccgatgctgaagttgctgaagaagtgctcgataaaatcctcgcaatggcagacgaagaggcagccgttgcagaggaaagatacggtacacagcacagcctcaatgccatccaggtcgggtcggagatggattatatgtttacatatccagcgggggaattaatcaatgttgctaccatgtccttcaacaaggctattgacttttaccgtgctacgcgggaccaggattgtcagcgttgggcggaaaaagccattcgtgttgcccagcttgtgcctggtgctcagggcaaagcgctggtcaacgtacttcagatcagactgggaagcttgattggagtttgagttggtgttggtattggtgggctggtttgggctggggtgggtatgtggttcagataaattgtgacaaggtggaggattgtgtgtgtagtgtgctaggtacttgatatgaaattgaaaaactcaaactgattgttcttatgctttcccgatcaaaaagaaatatgaagagaaagaaaggattgatcttcgtggcgagatggcctatagagtataaatatgtgggtatcatcagaagggaaatgatctctgagaaatcagaaagtagaaagcaaaatcgcccaagccacaaaatccggtagatgatgcaaagatgcaatggaacaaaagggagaaatcaagagaatgctcaagtcaagatgtcagtaaataagaaagcaaaaagaaagaatcaaggaaaggcactatgaaagcgccacagcaattccacgaaagccataaaacaccaaaaatgcagtctgtaacttttccgaaagcagaataaagatccccaatgggataacccagttcattcctccccatgcgcatcgcaggaacggctccgcgaagcctgccgcacccccttggaccgcagcgacggggtagacggcatacgatgagggatacgaggcaacttgggcatggccgagtagctctgtttcggctcccgctccatgtccttaccgctactatctgtctctgtctcgccgctctcatcgctgctttgtctatgaccacccacaatgcggagtgtgagattgagctcgcgctcgagctccttttgcgcttgcatgcgctgactcgagccgttgagtttcttgcgatacactcgcagagtccggcacagctgctcggtggatgtgtctaagcttccgacctcgctgcgcggggttgttttcccgcggttgcggaagtcgatggatgtgcggcggttgctggttcttgcggtgtgtggtttccggggtgttggggtttttgattttgggcttattggggatggggaccgccggtgtcggtcttgctttgggcccggggttggggagaggcggtttggaggggaggatctttctgagacggcgtggttttttagtgatgatggtgctagggatagccgagacagcttgcggagtagagttggagagtgctcgcggataggtgttggtgttggaggattcgggctatccggtcgttgaaatccggcgagttcgctgcgggaaaggacttttcggagagggggccttgccgctgtcatttctttgacggggcattcgtcgtcctcccgtgtgtttgcaaggtctggggagacctgttgctggacagataggttccatatcatcacaatcccgtccataccggcactcaccactgtgcgcttggtttgggacccatcggacttatcacgctcctccagaagtaacacatcggttacaccttctgtatggccaaattcaccagtaaggagctggtctcgctctagatcatagacgcgaatagatttatcggtgctcgaaacacctataagaaccttcggagtctggcctgagatctcggaggcaactgtcaaagagcccaaaaccaccgcatcagctgtctccgaatcagatgccttgaaactgtgaagttgacggccggttgggatatcgaatttcgaaacacaacggtccatggtagaaaggtatagaatgttcgagtcgtcgggacagagtgtcatcgacacgggggaagccttttgagtgatgacccttgagatcagataggcaacagatgtgccacaagccacctcgcgtgtcgcgcgacctcttatgacaacggtgcgatctgcggagcacgaaagcaatttttcaccttcgttgatgaacagcaactgattaacagccccgacgtgatcgtccatggtttgaatcaactgcaactcgttgtcccgtgtctcgaatagttgcaccatccgatcacgcccagaactagctatcagccaggtctcgtccattttttggatggccacatccgtaatctctccgccatgggcgcgcgcctcgttgaggcaagtccagtcggcgttcgaaaagattctgcatcacagtcagctaaagaacattcggttcatatcctaattttgtacatacctcaacacaccaaacttgtcaccagagacaaaccagtccgcattctcagcggtcctcagaactttgagttcgtttgccgcatcgtcttcttttccgggaaattggtcgagatcgatattcttcgatcctcgacacttcccttgtgcatcccaaaagttcaccgtaccattgcgagaccacgtgaagaagtctgcagacaagttattgggaaaatccatgcgacaaataccgagaatcgggtcccgatgggccggcatggaagcctcgcctgcctcctgttcaccatcttcacctagagtgtcaatcgggtagacatgaatcgcgcgggttgattcaacagtaaccagatgagaactaagagaccccatgcaagtgatcgccggtgccttgcctttcttgtcaagtgcactcttttcaaggcgcgcaggagaagtcggcgtggatgttccacgtaagacttcaaatgataatcgctgcatttgccttcctcctccacctacccatatggactcttggtcaaagtccacggccaacgaagtgatgctgaacccaacttgctttaccgtgatcagcttctgagatccttcacgatcatcgaaaaagcaaactgcgcctgaatctgtgccgattacggcctcgttttgggatatactgctcacacaggtgaaagtattatcgcctagggtgcccagtagacaattcctgccggtaagtgcttttggggcaaaactgggcgagagggcagctacctcgacattcaaacgtgacttggtcggtgaaacaggccgaatcgccgtgggaagacgccagaccttaacatgccgcaggccggtcctaaagaaaaacattagttgactgctaagtatccccatccgatcaaacgtacgtgaccaaagtatggccgacccagcacatatcattgataaatgaggtgcatttattcacagagtgtaacttggccgagccattcttgaggtttactgtccacataaagagaaatccatcgtttggattgccgagcgtggccaaatattgagagtctgggctaaacgccaggctgcgaacaccaaaggtatgctcgtttagaatggacagaggaacatcaggtaaggcatctctcgctgtcgaaaatatcaagactcgaggattatagccagtcttgacgtcgttagctgccgttgttgtggcaataatttatatctcgattcccacttacctctcccactgcaaggaatcttccattcgggctgattgaaacactcgtcactgctttgattctttccctcgaagaccatccacgtggactgccgatgtcgatgacttcgctcgacggagacccattgacattaagatgcggattcgaccggatatgggaaagggatcgtgatctggggtccgggctgcccgggggagtcgactggttgtaaaaagaagttgacgggttgacactcgtcgcggaggggcgggctcggaagaagcgttgtgttatgttgtcgttctcgtccaattctgcaagaaccgctgctgatccagcacatagcgcaaagcttctgctctgatcatggcatgaaaatccgtttggggttgtagttgttgtgccgatgacggtttggagggacaaggaggattgatggagggtcttgctgggggttcgtgtccctggtcggaggactggagagttcgaaggagtgattttcaaggatgcgctgggtccagcaagcttgctttttgcactggggtgagcggtggtggccatatcctcggggaggcggtcggcgcttcaatgtcctctaagagcgtgggatatttgcatgtcaagcaaagttcatcagacaggtttgaggatgccagtgaggctgtagtaggcgtccggaatttttatgtcggagagtcggtcaggagacagtgtggaggattggtagaattagtgggggcaagctaggatgaagctctgatcagctaagtccgatctctatccacacacacatctataactcaccaaaagagggtataggacgagaaaagtcaacaaacacgaagctcattccgcactaaagcagatcattccagtcagaggaatctgaaccttctggatgcccctggctccatggggttatttgggctttttgcttggcttctgattggcctcttggatttgaggaattaccggattctcacttttgagaccgagggacttccttcgatctgcggaaaagcgtgatatgaacggtgggtcgtgtacgcacaggtcgccgcactacccgcaccatcggctcagcgtgagctttaatgggagtatgctatactccgtacgttggatgtgattaaatcgcaagatcacatcagatcagatcagatcagacccaagggaggctcatgggaggttccactaccgaaggcccacagctccgattgctcgtccgatcgttgcattaatcttggaagtttcctcgattcagtctcacgtgcctggaatacgatctcgtgccccccgatgccctaatctcactggcacaattcgacctgtccattgcgatacatcggcagctccggtgttgaacttcttggcaatcttacatgcccatttctaccaatcaaatagatctgtaccccgtaagcacgaagatctctacacatgtgggatctaacccgtgacaatctccttcaccatcatccacgtagtagctctccccggaatttctcaggaagctccatgttgaaatgcaaccttcacttaagataaagcgagtagtcttggtaagctttggaaggtttcgggtagttatccccatatcatatgacttgctattatgtgtctttttggtgtctttcatattgctcttcgtagaattctgatactatcatgtggcttttgtgttctaaactaccacatagagtcatcatagagcatatacactggtaaagtatcaattaaatacaccgagagcgtatacatatcgtaggcaacttgatacaattgcagaggtaaaactataccgcactttcaaaatactacctggtaataccgcggtggcatacttagtttgtcgctcgtactcgcgatagtcgcaaactgagagatcgcaatagatggggaaaagaatgaagatcttattttatatcttgggttatttgttactacttgcatatcatcattcgtagcctttagtatggaatatagcagacatgaatagccccatggtcttatatgagagacgtacagcttatgttgccgagttatgtatttcttgctctctccccctgctactctctttaatgtctgatgtcaccatgtctgttcaattagacaatcgccagtcgattaatgactattgccgttcttatgcagaggatcaacttattggaggcacgaagtatggcaaccaggtcgttaaactaccgggttgtgacttggtggttaagttcggccgttaagtctccccctacgaggtaaagaatcagcgaaaagcgtaaaaaaaaaccagataccattatagtcccttaggttcattcattttttataggcaatgagggttggggctatatagtatcggatttgattccgggcaaaactattgatcctcttctgaactcttacattcttagactcgctgagtattttcactctattaccgccgatagcgctggtagcctatgtggtagcccgtcaattgacttactctggcccgagtcatacctagtaactggaggaatggttcaatagccggttttccccaaatatggcaaggctcaatttgatcttagcctattggtattttatcatttcaatatagcccctccaaagcttctctggttagatggtggccgtatttgtttattagactgggcatcagcagggttttatctgaggtcattggaatttgccagtctattctttcaagaatatcattccagccagacgcatctgaatgccgtcggttttggctctgggcgtgatgaagaagagctgctgctaccaggcattatacaacaatgaaaggtcctccttataagtcagcagaattgcttgtctctgtgaacaacgctgagccgaaaaccagtcgttcgagggacattttagaatggtcttcgcaccatcgataggctgattccacctttccttttccactactaccagcaccacaacttctgcgttgagaaagggacaaccttctaatggtaatacctaggtagtgtcccataggactagtcagattatcagatgagagctaaagcatgatcgatgttggtacaacttatgtcggaaaaaaggtaaagaacgatgtatatagttctggcgtttagcaatgcaattttcaatacaataatgcagctgctcgatcttctacaaattaatgtatagagttacaaagtcttatcaatagctattgacaataaattccaacaacgtgcacctgtatgtagttgctgagatacaaggaggtcttgctatgtattttggggctcgcttgttagttctcttatcgccacccggatattttctcttcgatgacctctggaacttccagatctcacattatctatcaactttgctctgctcgtcactcccttttttcattcatctacaacatattcccaagatggctaaatgtgctgcctcatcgaggctggccctgcctgccgttctgcgcaatgttttccgctctcagctcaccagcgcttcttcaagcccctatcgccgacctcttgcctccggtccttttttctctttgaatatccatcttcagagatccttccgttcaatttcgcgcttgcatgattctcagaatgatcaacaaacacccgcagcccctgaaaccacggctgtcgccgatgacaccctgccttctcaacacaaaaaaccaaagaaagattacgactcattcggcaagacaggtggttggaatactcataaacgccaccccaaagatcaacgaagggaccctgatagtaccggaagaaccgacagagagcgcagagctttccgcaacgagactcgcagggaggtgaaaaaagaacctcgcagggattggcaagacagagccgaaaaatcgaaacaattctccgagaacagaggaaagagaaagcccgagaactggcaagtgcaaaaagccgctctgaaagagaagttcgccggtggttggaatccacctaagaagctttcacctgatgccctcgatggcatccgtcatcttcacgcgaaggcacctgaacaatttacgactgctgtcctcgcagaggagtttgagatgtctccggaagctattcgccgaattttgaagagcaaatggcgcccatcggaggacgagatggagagtcggcgcaagcgatgggaaaatcggcatgatagaatctggagtcgtatggctgaacttggtcttcgcccttcgacaaaccgcacgcgaaacctttcggatttccatgtgctgtatgatgacaacaatcgcgagcgaagatagtcgtctgtgtacatgataccatgctatatatggggttttgagttgcgcttgtacaataaataatataacctagaggaaacaacatatctcttataactagtaattggttgcagtatggagtagggtgggtatcatggcatttagcccgtagttcggggtttagttcggggtggagctaggagcaaggatatcgtcgccacaactcccccggcaacacatcttcaactctccaaccagcatggttcattcgagttgacagaatgctaatggcggcatatttcaccaagcttcgacctaattacagctcaacgtgccggcaattccctccagaccttggccctcgaaccgcagcccacatgctgagacaaccgccatgccatccaacatccaagtcttcgtgaaatggaaggaccagactatctttgcaggagaggatgtagaatgtactataacattcaagaacgtggccgatactggcgccgatgccaataacgcgggtgaaggacaacattcacggaaggtctctcgagtcgcaaaccacacacccaagtcgaactcggaatctttcttcggatttaaatcgccccaggctctcttttccggtcggcgatcatactccatcagctcccaacggaagccttatcaccggacggcctcgtccctgagctcttcgttggtcggctcccatagctttcctccgaacagcggcccctctacaccgcgagaatggcaacaaggccacaaccataaacgatccgtctcaatcctctccattgatagcgaaggccagaccgatccgacaccttctccttacaatcgacgtcagccagtcaggggtcatgggcgctcggcgagtctccaggttctaccgcggaggaacaatagctacgaggattcttacaaaaaaggtagatgatggacagtgcaaaacatgcgaagggattttcaactaatgagtgtctcgtatcagcgagaactccctctcatatttctccgtttccattgacagaggctcccaacgagcatcccaatggcaatctgagagtcgatacctcccacttggggcgagccacccaacctggctctcgagcgacgagtccaacaggtgccatagagccattgcgtccaccttcccgacggccccaaccacctcccctcgattttaagtttccgcccgcggcttcagccgattcgactaacagtcgcaccgtgcgcaccccatcaccaaagtcggcgacaacgaacggtacatcatcaaccgggggaagacccactctcaaagatgtacagggtctatctggaccggcgcatcagcaactaactcggatcatatcagtcacaagcgtgaacgggagcaaccggagcagtggggagttctactcagtcagcgaccactccaccgagaccctcggatcagaatacacgaattattctctccagaatgggcgagctccctccatgcggcatgcgcggcatcattcaagcgtagttgcatctcctgccaaagcctccaacagccaggcgctgctgatgggctatgcgcaggttaacgcatcattcacggtcgatgggtcgttagtaaaccagtccgccttcgacgaagtcaagcgaaagggagttgttggtggccaaccgagttcaggcggacttcctggccgcccaacgccaacagccgaacgaccacgtaagagcggtgggttctggggctcactcagatggaacactatcgaggaatctatcaatggccttctttcaaataacgagttggacggattacgagaaatgcgtggtgttacatcgtcgagatcaattccgctcttgtccacctcgcagtcgctgctttttgttgacctccgactggcaccaggagaggaacagtcgtattccttctctttctcccttcccaaaggactcccggcgagtcataaaggaaaagcaatcaagatctcatataatttggtcattggaactcagcggcctagcgggcctaacgagccccaaaaggtcaaccgcatcaacatacccttccgtgtttttagcggcgtgaatggtaagttacattctttgcttttccttccatcccaatttctcacgtccttatagaaaagggagacattcttggccatgacttgatgtcaccatatgtacttctacgggatgaagcgaaggtccaaaaggttgggccagtgatgcctgtgtcaacgaagaaccaaagtattagcaagtctcaccattccgcggccgacttccttggttttgtggatgagatcttggagcaacgtgcgcgttccaacacgctgttcccacctggtgctacgccctcgagacgacctagcgtcgaaggattacctcagatgcttacttccaaggatgtcatcgatattgctatccttcgaagtaaccaggctgtgaactctcgccgcagccccaatcgctttgagattgcccgcgagggtaaacgtatcgcagtggtcgtcttgaaccgaccagttcatcgacttggagagaccattatcgccacaatggattttggagatgctacgattccatgctacgctgtgcgtgcctcgttagagacgtccgagaaagtcacccctactttggccatccggtcaagtgccagtattcaccgaaccacacggcgcatccatgcttctctgtttgagaacacactccatgccacccgagtggctttcagccctgctatccccatcacagcgacgccttcaattttgacgagcggtgtgaccctcgactgggagttacgattcgagtttgtgacatccagtgttcgaggcgatcaaggggccccgccatcaggcactcgcttactcgaggccttgtcatcggatgatcgcggcacggtgctgtctgccatggaacatctgaactgtgaatcattcgagattgctatcccgctgacggtttatggagagactgttcgagaacgactgcccgaggagaatgaaggctacccaatctagaactccagatgtacaccacaggtataccagatgaacatgtgcttgcctgctgtgcaggttatgcttgatcttattttgattaaatattccccttgtgccatcgagggagaaactcccagaaatatagaccccaccaggctctagactcccatgtataattgatactatatttgaatcgaaaataacgacagtgcgactgctaccaagtatgtaaatgtaaaatatatcttatagtctgtgacgtcgacgcggtaactggggcaacgcggtcagtcaaccgatcggatctgggcactttatcaactctggtggagctgaaacccgataacatctctctccttgcgcttctctcgaacatatcatccagaattattgtcaggtaggttcattggcattatctgcacgtcagcgcatctacacatctgatggcgtccctcaaatatcggacagcgactagtatctaacattggaatgcaggcacatcgcgatcagcgcaaaccccgccgaaatacacccctaccgaagggattacttttttttcctcgagcctgagagaatatggcttcgttcatcaccaccatgtctgtccccgctacccctcctgctgcccatttcatttcccctggggagcctgcctctcgctccccgcaagcactcccttccgtcatcagcccttccgtcgtgtaccacactactcgcacttcccatctccccctctcggagcctccatcttacctgtcgccggcagtgcgcgcactcaaacagggctgttttggactaacacctcccagcaatgcacgcacacgcgcccccttcaagccccgctcgtccgccaagggcacaaacagttatcagctacgacagtttgccgaggctacacttggaagtggtagcttgcgcaaggccgtgaagttgcccgaaggcgaagatcagaatgaatggctcgccgtgaatggtaagaaacatcttgcggagttgtactgggggtatctgctaacgttttggcggtctagtggtcgacttctacaaccagattaacctcctttatggctcaataactgagttctgctcaccgcagacatgtcccgagatgaaggctacagatgagtacggtgctttttcgacagctcgttgaccccagcttacacgtttggataggttcgagtacctctggcaagactcggagaatttcaagcggccaaccaagatgtccgccccggaatacatcgaacatttgatggcctgggttcagagcaacgtcgacaacgaacaaatgttccctagccgaatcggtgtcccattccccaagaccttccctagtcttctccgccagatcttcaagcgtctataccgtgtctacgcccacatctactgccaccattatccagtggtagtgcatctcggcctcgagcctcacctcaacaccagcttcaaacactatgttttgttcatcgacgagcacaagctggccagcgggaaggatttctggggaccgctgggtgatttggtcgatagcatgttacgcagcgactaaggattgaatcgggatattgggtagtgattgtgttttgcatctgatctccgcagtcagggatactggctgttctacggaaaggtgtcttaatggcgtttcgggtgcggcatgcattgcagtattttagcatgggcttttggcgtttggggcttgacctgacgcgaagaccgaagcgatgaatccatgtattttttttttctgatttggtaacaagaacgccttgatggttattgtaggttatcgcagatgaatctccttttcagtctcagcctcgggggaagcagatgacaaaaagagacaaccacattgttatccttcttcctgttaaatccactctccatactccgtaatagcctacgataacctacaatacccaatcattggtaggccaccagatgcactaattatagctaatatgccgctaatctgagatttgatcaatctcatgtttcctgctgcatagttgacccgaaactcgatggatctccaacatcactagcgtatggatctcgcaactcctttgagagtcgaagatatgcccagccgccaagcaattatacagacacgtgacttggtccttgtgtgcgtacacgtgaccacgggaacattcggcccggaggtctcaaccttgcatcctcgagaagcaagcactccgaacgtcgatatcacctcctcaatccaaacctctgcgtctctcctccctcctcgaggccattcctccagccaattgcacaatgatctccgctcgcttcgcccgcgctggcctgcgtgccacccagttctcggttcctcgcaccgccgccgttaacggaatcaggacctatgccaccccggcccaggatacccgcgcccccgtcgccctgttcggcgttgatggcacttacgcctctgctctggtatgcacctccattgcctcggtcttgtcgcgaccgtgtgcttcgccttttcgcgacgaacaccccgtctttccccgacccctcccacactcttcaaagcagtgttcagatcctcatcaaaacactgcaagcaaaaacccggaatgaattacccttctaaccatcctcgtgaatagtacaccgcttccgccaagtccgctgctctcgaccagactgcccgtgctatcgccaacctcggcgagaccctcaagggtgacaagaagctcgtcggcatcctcagctcccctatgctcaccgacgaggacaagaaggccatcgttgaggagctcttcaaggtcgccggtgctgacaaggccgacaaggccggtgtcgtcaagaacttcctccagactctctccgagcacaaccgtttcagctccctcgagggtgtctgcgagaagttcgctaccctgatgggcgcttaccacggcgagatcgacctccacatcaccagtgctcaggtacgtactccatgagctgtgtttcactcgcagaaaaaaaaataaggatataagctaaaagtttgtccgcaggagctcgatgccaagaccattaaccgtcttgagaaggccatttccaagtctcagttcagccagggcaagaagctcaaggttattaccaaggttcgttacaatcgatggaatttttttttgtagctatttactaactcattgaccaggtcaaccctgacatcgttggtggactcatcgttgagattgccgaccgcaccgtcgaccttagcgtttcttctaagatcgccaagatgaacaaggctctttccgatgctgtgtaaatgtaaattagcctcagtgtttgaggggatggttagattatagcatatcgtcccggatgaacggtagcgttcgtaggggaaaagggggattctaagattccactttctacctccattttgttttgttctcattacttcaattgcacagattcatctataaatgatgtcttatagatcgatgtttgcctgagtcctacaaggtacggtagacagcttgtctagtgggttgatcatttgactcaatctgtttaccttgatgtttgccgtccctttcgtatgtctggacccgaattgccggtctgatcgctggttaatctgcgcaatgacttttttatttctatatctgacttgtaggagtgcaagagcggtacgtgatacacccacaaggcgagcagctatgtcccttctatttgggagctcatgatatcattgacgtctacttcgctaccaaatgctctagagatcaagactatgctccgaaatgccatgtatgaatgggttggaaatgatagatagcaggagatgcaacacatgtgaaaaagggaagagtaagcacaaagaagatcgtgactgtcgtgtccagaagtaactaaataggtccagaagcaaccaaataggaaagcggccaggagagaagagaaagaagaaagacagatatcaaacgaggacgatcggaatgcaaaagttagacagcatccaaagccgaagagactgccccattctactaattatccctgtcaacctgcgtctcaaactcatcctcgtacgcagcaatcgaagcagagctgcgcactctctgcagctgactctccacatagtgattaacatgatcttgggcatcagcgtccgcagtactacccctgcgactgggcccacgactaggaccacaactctcaccatcatcatccaagacggtcgacgcagcgggtgtaacatcgccggagtagaagtcactccggttcccgatggagcgagtagtcgacgagcgacgaacagacggacggcccgagctgcgcggtcgtccagaacgggagaagatatcgtcgaagtagtgcgacgcggcggcgaagggcgaccgcggcgtctgcggtagacgacagttgataccggtgtcgtggatgatctttgcgatcagacctgtccatccgcactggtgcgatgtccccagcccgcggccgttgtcgccgtcgaagaactcgtggaaccagagattgtctttccagtgctcgtcgaaatcgaggaggtccgagccgccgtttacagcgcggcggccttcgtcgttgcgggcgaagaggtgctgcatgcggtgctgcagttcttctgctacgtggccgaggttcatgtagtcccctgaacccttgggacactcgacttttagggtgtctccgtagaacatgtggaagcggaggagggactcgacgaggaggaagttgacgcagagccagatcgggccacgccagttgctgttgccgccgaagagggaggagtcggagtcgccggggacgtagccgaccttgaaggtttggccgttgacgtccatggagtaggggtggtcttcgtggtacttggacatggagcggataccgtgcttggataggaactctgtttcgtcgagcattcgctccaggatcttgacgagacggtctttgctgacaagggccagtaggagtcggtcgtctttgccgcggcgcttcatgctggcgatgttgcgctcggctatgtctggtttgttctcgatgaaccagtccactcgccgcttgaacgaggggaatttattgatgagctcgggctctagggtgagaaccgcatacagcgggatcaaaccgacgagggacctaatgggtagctgctgggtccatggcccgccgtaggagatggcatcgtagtagaagctgtcatcttcgttccagagggactgcacggtgtcatcgcccgaacggaaggtcattgcatcactgatgagcaggaagtgctcgaaaaacttggatgcaatgtcttcgtaaatgcgacggtgcttagccagctccagggctatgttgagcatagtcagacagtagaaggccatccaaccagtactgtcagcttgctcaagcacaccaccagtgggcaacggctccgagcgattgaataggccgatgttatcgagtcccaaaaagccgccctcaaacacattcttgccaccggagtccttgcggttcacccaccaggtgaagttcagcagcagcttttggaacacacgttccaggaagtccagatcctgtcgtccgtacatcttccgctcaatcttgaacgtgcggaacacagcccatgcgtgtacgggagggttcacgtcgccgaagttccactcgtaggcaggcagctgaccgttcgggtgcatgtaccactcacgggtgagaagatcgagttgcttctttgcgaaatcgggatccatcatagccagtgggatacagtggaatgcagtatcccacgcagcgaagaatgggtactcccaagagtctggcatcgataagatgtcgtcgatgtacagatgacgccactgctcattgcgaatgccctttcggcccgccggaggaggaatttcacctgggtccccgttgctccattgatcccagatgaagttgtagtactgcttgcaccacatcattccggagaaagcttgacgctggatgttgcggagatcctcgctcatggggagagggttgaggtggtagtagaattcatccgcctcggtgcggcgctgttcaatcacatcgtccagaacttcttcgtcgacaaattcttcctttttacgggacactctgaaacgaacaacggcgcattcgccgggaggaactccctcgccgttgttgaaagcgtaccacgcagcgaacttggtaccttcgttgtctgggttgatagcgcctttctcttcgtcgacaatatgacgatggaatgcgtcttttacatagggggtggtgttctcggtaccccataagaacttgttgttagtctcgttctcggtgaacatcatctgaggcgtaatatcgtcatcgctagatccaactggaggtgatggcgcgaaggagacatatcgctcgccgattgcgctgtgcttcgatttggccaccatgggtccctctttcttgatagatggtttttcctttttcttctcgtcaccccagccccacgtgtttctaaaccagacatgggggacgatgtgtagatgagcaggctcggggccgcggttgtacgcgatgacacggaagagcaattcttcctcatcgtcggcctccttggcagtttcgatgaagatatcccagtagcgattgtcgtcgaagatgccagtatcaaggatctggtactccttctccaagcgtgagcgctttgcattctcatcgatgaggtcttggtaagggaactttctctgggggtatttgtagaggaatttcatgtaggagtgctatactccgggtcagcattctgagataacgggattgaatttaaagaagggtttaccgttggggtgttgtccacatggaaatgtgcctccttgacactctcaccatgattaccctgagggttcgacaaaccgaacaggcgttccttcaagaagtcgctgtgctctcgttagattccatgaccagacacggtcttcgaacggagtctagacttactcttcgccattccaaaacgcaaaggcaatattctgaatgccgtgcgtatctgatacaccagcaattccatcttcgccccagcggaaagttctcgatcttgcgtgatcgtgggtgaagtagctccaggcgtcaccgtcttcgctgtaatcctctctgactataccatggtaaagcggcattagcccgctgtttctcgatttggtatgatttgcagatctcacctgtggcccactgtctctccgcctataccaatagagcttttagcactgccaatctgtctgtttcaaagctatccaaggcctcgacttaccacatagggtccccagcgctgtcgaagtagttagcaggagtgttctcaagctagttccaagttagagagatgttaccttccaatacttggttctctcgcggtcttcctttaggcgcttctcttcctcggtaatgacctctttcccatcgattaagaccataatggcgattgcaaagcagtagccaagttaatgccaaacaaaaaaatatatgaaaatgaagacgaagagagggggggaagcaatcggccagaatggaggggagtcctgtcgaaggtgcagtctgtgccaacctgcggccctggagaaaatgacgtgaatcactgtcccaccggtccaccagtcgaggttcgggtggagaatcgggtcgcattagggaatgagggccgctgattggccgatatgactatgttcggttcgggcctggaaaggtgtgcaggtcatggacctcgcttttgcccgaaatagctacgagatcaattgactttggattagctatataaatagctataagctcttatgtctcgcttattctgcctttgcgtcgaatttgctacgttgtagtgctttacaacaaaactaccaaggtggaaaaagagtccatatctcaccccatataaggcggggaacaaatgaaagatcacaaatcatgatggtctggcgagaactgtgtcgatttggtgatacggagtggacggtgcccaaatatcggcccgattgttctagcgctgaacgttggcatcgggaatgtgttcttatcattttatagcgctgtagctgagacattcatgttacaactaagttgaggcgatatgtagcttgacatagcctggaataagcacagcatatgttataagcttggaagaaaaagaaaagaaatccagagtggattgcaatcaaatgaattgccaccaggcccactccctagatccacctcccatatctctaagacatatgtaccgagcacaacttgtatatccatctttaagcaggttgttttcatacggaactctcctaaggatcggtactatttctaatgcggcagagtctagaagaatcgaaacggttatagcaacctacacgctatagattctctggtgtaaagatgtagattatcctctagcaggctacacaggctacacaggctatctagaaaatggacctccgaagcgaaacccaaaaccataacaatcagggttgtctatattgtactgttgatgttcactatacctaacatccaaggaccttgcttcaaaaatcaagagagtaaccatagcgaagaatttaaatgaaacaatatattctcatgacatcctcgtcaaaccctaagttataggagcccggaaaggattagcttactgttgccaccatgcagagaatccgtaacaggtaaggaagcatataaaagccacaaaatcataccccgcagctctccaggagctgatagctccgtagcacatcaagtccgatcctcgaagtccgtgcctggtttctgcgcctcgaccagggaaacagggacaatgacggaatcgagtggatagttgggcgttcaatttctgactgcacgtctgtgattggacgccattggaagcccatcaacaagtcgcctgcttatcattcggctcgggcctggggttgcaggacaagtcccggaactatatctccagtgactccggagaggtacatcaccccagggtataaatatgcagatagtatctcgggtccgggaagtctgattgaaagaattcattttcaagcacaaaggcaaaaaaaaaaaaaaaaagacatgggtgaatcgcatcgccgtagcagtgcaaatgggggacgatcttgggaatattccaaggccatatccatacaataagggggtctctcaaaggatgctagaaaaaaaaaagataaaactaaaaacatcatccctataaaataaccacgccgactgggacatattgcgtctaccagacgcggcgcgagtccaatatcacggatcgtttgagatttccgccctgatgcgctcgtcccagccttaatctagtcccgactccaggaatccggtggcctatattttgaccgtccagatcttgataccgcagatgttcggaattcagttgtttctccgctgctcagactgctcagattcctcaaactgctcagacggttcagactgctccggctgctgctcgttgttggatccttcttgggaagctgttacacagtcagatcccgctacagcgcaaacccggccagctatatcaaaatcggcccgcaaaaaatcaagttgagcgctcaccagctgactggtcttgtccctggctggtttgggacgaagcgtggtcactccaggtagactgggactggaggcgcctctcggcctcgcggatgcgattctgcagctcttccaattcacgggtctggatcaacatctgttgtttccttggctttgaggttagcgccatgaaaatgagggtcgtgataacagcgagagtcgcgatatcgacgataaagggatgaacaagtgccactcacttctggctaatggtttgcgaaaggttgtcgacgtcagagtccagcatgaaggcgctgtccaaggccgtcgagaatgcttgcgccatggtcctgaggtcacggttaacactactatccgaagctccaacgacaatatagaggaacgaacgactgaggccgaaccttcggcttccactcgcgatccatgtcggacatcgtgtttgatgattcgacctccttggtttctgtgaacatagcgcgggtcccaacagctaaacggcgacagaggggtatgcgaccttgagacaggcgaggcaagagcaagttgcaggataaggtattaggcggtttaggtatcgtcgagaccaggaccgccaagaatcaagcacagatgaaaatgaatcgaggggtttgatgctgttcgaaaaacaaaacagggtcagtcctttatacttctcgacagataagccacaatccggtgggaaggtgaaagagataccagatatcaatagcagtcgcgatgcgatcgaagagtgataagcagagaactttggagccaggaagctaaaggggggaaaagaaggagagaagtgcgaaacgagagatgatcataagcccaccgactatgttactagtcgcggaaattggaggtcccatatatctccaccggcaaggagagagctcgtaagtgttacaactgtattacagggattctacgccattatgcgtcgtattttgatgatatataggggtttccaaggtttgtttcaggggttgactaactattttatacttccgtggtttacgtgtatggttcttctttcttagcattctgtctatagagagaaataggggttgatacagcatatgtatgtacttggttcacctttgaaacaggaaattggaaattaagaggcttcctttatagaaaaaggcaaactagcccctgacatgggtttcagggcaagggatcaggggactaggggactaggggattttcataccctcacttctacgggactcgaaagatataaggttgaaaacgtctatgctttcagatattagagaaaacattcagatctatagatttttagactaataacttatacacagcacgtcgtacgttgcataacttgcattctggcagattcctccctggcaactggtcacatgacctataccatacagtacagtagcatcgtgaatctcctcaatttcagtctccatttccatttccatcggcatttcaattctacaggggcatttcatctcgtcgcttcgtccatctgtaatccgacgtgttttatctgacccgttgtggtcgccgttgatttttttcccgctcaatttttcgcgcggatagattgaagggtcatgcgtattgcgtttctagcctgtcgcgttcgctatctctaaataccagccgacctagcccccaaagctcacagtgcagcgataccgagcactttccgtgaccaccctgatcgccgatcaccgaccaccgtggcccccatcctcaaagccttttcccccagtggccgaccggacgggcaatgggggatgcctcctctgtcggcatacacttcgtttgaatcccttctgtttttccagtccctagcgacttcggattcccgaccgacaagcttcggctcaatatcaaccttcttgcgaaacaaccagctcgtgcgcgagaatgtcgattttgatgccgatcgcctgaccccggaggcgctagaagacctctacgcgacattaatgcgcgacggatttagtcgtgatagtgcgccctcgctcaatggacgctccgcagatacctccagtccgcctagtccgaagaaacgcaagatctccagtccgcgatcagatggattggctgtcacccacaccacgctcgttccagagctagtggcacacctttacgacaaatacagggatctggtcaccaccgaaattagggacgatgagaaaaagtatacagaaatcagggctgagctggaacggctacagcaggaggacagcaaatcagccgctgcggcagctacagcattcacaccggtgcaaccggtgtctatcgaaggaaaggatgatgttctgaaggaagaggcgccgcgcccaaatgtacaggatcagacaggtcaacctcttgcgacgaccatcccgctcgaccaggagaaggcgaagcccgaaccacaacatatcccaacaaatgtgccctccacgacaaaggagcctccaacaatacaacccgcccctcttataaaccaatctcaagctccccttccccaagcgcaacccccgacacccaaaccgcaagacttagctgggcaagcatctcaaccgcagccgaccaccactgatcccataccaaaaccgtccatccaacctccacttgctccatctacccagaaaccccctccaaccacaccagccggtccgcgagtcacacctgcacacccgtcgcaaatcgctcctcgtgccaatcccgtcccacctgcaccaattgttacgggtaaggctggccctttgacgtcggcgtctcagcgaacccccgctcagccgagtttccagcagtggcagctagatccttctccccactcaccataccccgtcgtctccccaggtgctgctacacctcaagcagcccaggccattaccaagcgacctgtactaccactttccaccaacccgcctttgccagggtcacaagcccagactcccatccaacctcctgttccacaaacacccagtgccgtcccgtctacagctcacacacctgtcccaattggccgtccgcgtgtttcccaaacaccgagcgccacattcccatctttctctgaaacgcgcgcctctcatccacgcttgtcaattgacacacaaggctcctccacaccgtggaagagaactcctcgtccgaggatttcacgctctccaagctcaccgccacggccacggccggaggacgtcagtcccatcagcgaacgaggccaatcacctattgatgcgatggaaatgtcacctccgccgaagattaatctaggccaacgagctcaatctgcagaagataagaaaccacaacgcggccagtctgacatcaaacccgcccccataatcaagaccgagaaactaggtccaattcggaggacgcgcgccgtgagttcgggctcttctcggagtcgtgggcgatccatggcttcgcgcgatgggtctgctgcaccatcggaagagaccatgcgtgaaccacgagcgacgggccgccgaaagggtacagctgttaccgccgatgaagggacccccaaaccgcggacaaaacgtaaacgcggcgcaagtgaagcagtggaacttgagccccaccctgcggatatcccgagattcgacacgactcagtatgtcatggctacgcgcaacttccaccgaacagcggcaccgattatgaacgatgtagctacccacaagctcgcctccatatttgccaagccaattagcgagcgcgacgcccctggctaccatgatctcatctatcggccatctgacctcaagtcaatcaaatctgccattcaccagggcagcaaggctgtcgctactgcaggagaagcagccagcactccagctggggatggagagtctcccgctcctggtggcacaccgtctaaaagcggcgtgctcatgttgcagaagcatgaggatttcataccgcccaagggggttgtgaactctgcacaactggagaaagagttgattcgcatgttcgccaacgcgatcatgttcaaccccattccgcaacgaggattcgggcccgcctttcccatgtctagtgaccgtggttcgcgagagagtactcaagtggccgattccggtgaaggcggtatcattcacgactcgctggagatgtttgaggatgttcagcaggctgttacccgatggcgggccgctgaacgcactgctgatgaattggctaataagaatgtcctctcccttcggcgtggaagtcccagtgaacccaacaccgatagtactgatgatgtgaaagggtaattgatttggaacgccatcttgtattatgaactttgtatttgattaagatcagtttatttgatttgtgaatgaatgccatgatgtctttcgtcggtgccttcgatagcccggcggttattaatactcctgctctacgtgtatattctgagctcgtgataataaaaggaaacatatcaacatgtatatcattgtcataacctttcagcagaggccagccctgctgccctgagtctataatggggtatatatattctattttccaacagccgacctctaagcctgccccggcctcgtccgcccaagcccctcctttgcatagaagtccatcggatacacgcctttattccccgcctcccagtcctggcgcacccccagcgcaacaagcgcctcatacggcgtcagtagcggccgcgtaaacgcatatccccaatcaatactcaaccgcggacaagcaatctgcacccagcactccacatccgccatagatgccagcttcccagggaagatttcactcagcagcaagttaacgattggaatgccgcggtcgcgcaagtgtcgctcgatcatcgccatcgtgtgcgggttaccctgtcgaccaagcgaaccgaggataatgccccacttgcgcgcggtcttggctgtggcgattgcgtcgcggcggatcgtgtgcatctcctcgtgctcgtagctctcgcgcgtcagggtccgcgagtacggatcgtaccggtaggctgggatggaggggttgtggatcatggcggattcgaggtggaagcggccgtcgccgaggtagaggattgcgtcgatttcggtgtcggagagttgtggtgatgtacagccgaggatctcgcctttggagagcggggtgatttgtggaattatgacgcggaaaccggcgcgctctagcacgggtttcaggccgtggagtgtcgcgttaaattggatcgtgcccactgttgcgatcgactggccgggcttgaagttgcgctctagtgttgcgaggaggtgggttgtgtcgatgctgatgtctacgaagatgtagagcgttttgatctgcgttacgtcgacggggatcaggcaactgtgcgcgtagtgtactagcaggtcacagcctagggcgcgggcagtgtagtcgtcgatgcaacaggcgccgtatgtgacgtcgcccatgatgagggtttcgattccagggcagaactgggttaggatgtcggagatggttgtcgcgaagatgaggagtccctctgggaattggagggctactcgcttggcgcctgatgtgcggactcgatggattgtcttggggatctcgaatgagtagttcttggggagaagctcaattgcttcttggatctcgggatcgttcagaatctctggtggcacttggttgagggtgcggggtgtgcgtctgggagcggctggagggagtgggaattagtatgggtagttcagttgagctatagttcggtatatacctgtttgcaccgctgtggactcgacatctttctgactggtcgtatctttctgggcttgggcatctgctgttcgtcgtccgacaaatctcttctttggttgccgcatttggcttgctgcttgtgagccatcctcagtggagggcgaaggaatgcttggctccatggtattcagctgtaatattcgtcaaaagatatcaagaattagaggtttcactgatcttgataacaaatgttggaatcgatatcatcccacttcttttttttctgccgactgactcagcaggaggtggggtgatgtactagtccggaagtggtaaagcgctctccgcattctcggctcccacagttccatgatcccaagctcacccttttacctgccatttctcttacaattctggtttctgtggtcgtacaagttggcctgaacttcgttatgacgataacccgccccaggttgagtcttttctctgccctacgatctccatactctgcacgccgcttctcgaccgagtcgcgcttaacatcggaccatgtccgcatcgtggaggttggcgctcgggatggactgcagaatgagaaaaaaacaatttcaatgcaaacaaagcttgagttaatcgagcgactggctaagacaggtgtcaccaccattgaagctggctcatttgtgcccgcaaaatgggtaccccaggtatgacctcagcggagcatcatcgtgccattccagacgataaaaaccgatttgcttacgttacgacagatggctagcacagctgagatttgtgagcacctccttacaaaaccgcctcaagcacaatctacaattgcatacaattatcttgtccccaacatcagaggactggagaacctggtcaagatcctggatgacacaggagtctccgcggacgcgactggggagacctcaaagtcagcgacgactacagaggtgtctctttttgctgcagcaacggaagctttctctaaagctaacaccaactgctccattaccgagtcactggagcgcatcaagccgattgtcgcattggcaaggagcaagaatatccgggtacgcggatatgtctctgttgcactaggatgcccatatgaaggccccgatgtggatcctgtcaaggtggctgatattaccgccaccctactggagatgggagcggatgaggtctcagtggcggacacaacgggtatgggcaccgctcctcggaccatggagctcatgcaagccctcaaggctgctggcatcgctaacacagacttggcgttgcacttccatgatacctatggacaggctttggtgaacacaatcgtcggcctggagcatggtgtccgcattttcgacagcagtgtggctgggcttggtggttgcccgtattctaagggcgcgacagggaatgtggcgacggaggaccttgtgcacacgattcacagcctgggaatgcataccggggtcagcttagatgagatgtcgaaaatcggaggttggattagtgaggagctgggccgagctaatggcagcagggctggaaaagcgactctcgcccgtctcgcaacagaaaaagcgtcactttgataagttatcctatagtctgtgcttgtcatcgtccggtgtatttattagtttccaatgggtttcacatatttgccaacaccacacgtaaatatgctttgcattgtcagtctagccattttgttatgtacactgtagatgtgatcaaccagaaccaacacccacccctccatctccgttacggagacattatatccctaggcaagaaacaccaacgccaacatgatgcaaatctctggtcaagtcactcagaaatcagtgcagcgaccaccatagctccaatcaccagctgcgccccaccgtagaggctcattcttgggtccgccaatttcgccagtcttcgggttcttctcgccctcaaactcaggctgcagtccctttggcgcatcggggtgaagctcgccacctctgccgtccgcctgaatctcggtctgtggagactggttgacctgaggtgtgctgaatgcgccagtcgaacgtttctggagctgttcaaagatctcctgttcctccttcgggagacgcgggggagccggggagtctgagaagggcatgggcttgtcgtcgccactctggcgcaggaatcgagttgtggagagtggccgaattgcaccgcgggctgcggcagccgagaggactgaacggcgaataacgagagtataaaccatcgtgtttgtatatctgtgtatgcaaggaatgatatatccaatgaggcaagtctggagttgcacgatgcacaaagcacagggagatctcgggagctcggggtttgttgactcactccaccgatgtgactaagattgccgaccccgatatcgccattttttatttctcccggcatgtcgctgatccgatcagacggttctcttacgattctcactctctttggccgtagattagttttggtttctcttctattcttataaatcaaaagtttgccatgtctgccctccgtgtggccgcgcgccgtctgcctcgcgcatccaaattcgtccctgctttcgagtcaccagtacagcgtcgattcgcgactacggccactgcccctcaaaatgtgaaatctcaggtcaaggtatgtgtgataaaaagtatccaggacatcgttcggatttggagctgacaatcgcatagaaggaatcaactctgcccaaccccgacccgtcgccggactcagtcacggcgtccttcattaatgagcgggctcctttcatggtcccgacttatgttcgcccggctcctatgatgatgaagggccagggttgctacttgtgggatatggagaaccgacgttatctggacttgacggcggggattgcagtgaactctcttggtcactgtgacccggagatcgcgaaaattatcgcggagcaggtgcgagatgattttatggactgtatagcgatcaattgcttacaaaaagaccccaattacaggctgaaactcttatccacgcttcgaacctctatcacaacccttggactggtgctctgagtcaattgttgattgaattgactcaaaagtccggtgctatgcgcgatgcctcgcaggtcttcatctccaactccggaaccgaggcgaacgaggccgccatcaagttcgctcgcaagaccggccgcactctggacccttcaggtgaaaagcacgagtttgtgtccttcaacaactcgttccacggccgtacaatgggcgccctctcggccacccccaaccctaagtatcagactccgttcgcacctatgcttcccggatttaagtacggagattataaccagatcgaccagctccagactcttatcactgataagacatgcggtgttatcgttgagcctatccaaggcgagggcggtgtcaacattgctactcctgagttccttgccgctctccgcaagcgctgtgacgagactggcgctgtcttgatcttcgacgagattcagtgcggtctgtcccgtaccggtactttctgggcccacgctcaccccactctcgccccatcctctggcgaggctgctcaccccgatatcctgactaccgccaaggctcttggtaacggtattcctatcggtgccactattgtctctggcaagacagttggtcagcacatcaagaccggtgaccacggcaccaccttcggtggtaacccattggcttgccgcgtcgctcaccacatcgtcgagcgtctggctgacccggagctccagaagtcggtccaggccaagtccgatctctttgtttcgggcttccaggccatacagaagaagttcccaggtgtgatctccgaggtccgcgggcgcggcctgattctgggtgttcagctcaccccagagtacatagctaaggctggtgatattatcaatgctgcccgtgagcgtggcatgttgatcattactgctggtaacggttgcatccgatttgttcccgccctgacgatcaccgacgaccagatccaggctggcctgaatattttcgagcaggctgtggattcggttgtggccaagtcataagtgtcttgtctgaatgccggttaagattttgtttttccttttataccatcttgtattgcgttggatatgacaggacatattttcatcatataaactagagcaataaaggaaaagtgtcgtgtgtccaaggatttatgtggagaggctagccacgtgtaaggcggaaggcggtggatcggttggagataaggagtcgtcgtcactcttcgcgcttgattcgacgtgcctccgtattcattcttgtctgtttctcctgaatattcaattagaatcaatatggactgaatatcttttgtcactttgttgtagctttttctaaacttcccaacgcaacaaccgaatgcctctccctgtgtccgatgaggatgccgcaacgcttccaccccaagagcaatcatctcccttctggaaacgtttgagcgcccgtcttagtggtgccttcagcggtgcagaccctcgagtctgtgttgctttctggctcttcggtgcgcaccctaaaccagcccagttgattagctcaactatgaactaacacccataccggcaggccttatcaacaatgtcctatatgtgatcatcctctccgcagctgtagatttagtcggacccgatgtacctaaaggcgtcgttctcctcgcagacgtgatcccgtcatttgcgaccaaactcgtcgccccatacttcatccacctggtcccatattcgatccgcgtcctcgtcttcgccttcctgtcaactgtgggcatgctggtcgtggctatgagcccaggctataccgatgggggaacgatatcgtccaagattgctggaatcatcctggctagcctttcttgcggtgctggggagctgagctttgtgggtctcacgcacttttatggcccgttcagcctggcggcgtgggggagtggcactggtgccgctgggctggtcggggctggtgcttatgccgttgcaacttcggcgctgggtttctccgttcatgtcacattgttggtttcggcctgcttaccagccatcatgggtttgagcttctttgtcgtgctacccaggtcccccctaagatctgctgaatccgacgctgatagttatcgcgccgttgagggtgggggcccggtggaggaagatgaagtggacgatggcgctggtggagaagacgaggggctcttgggagtgtcgcacaactcccccgcccacaagtccatccatgtcaatcaaggtggttcctggcaggaccagacacgcatgaatctacgtcgtatcaagggactgttcattcccttgtaagtatccgggtctttcgatagtcccaaatctaggctaacaggtatctagcatgatcccgatgctactggtatatatcgccgagtacgtgatcaaccaaggtgtggctccaactctgctatttcctctgcgtgaatcgcccttcgaccacttccgctcgttctaccctacctataatgccatataccaagttggcgtcttcatatcccgctcctcgaccccattcttccgcatccacaagttgtacctgccatcactcctgcaggtggtcaaccttgtgttgctaaccctccatgctatgtttgattttatccccactgtatggcttgtgtttatcattgttttctgggagggccttctcggtggtgtggtatatgtcaatacctttgctgagattgccgaacgtgtgcctaaggaggaccgtgaattctcattaggagctaccactgtcagcgactccggcggtatctgcattgcgggctttctcagtatgggatgggaggtctggttgtgcagttggcaggttagccacgggcgtgattattgccgacgaaagatgtagaatagagtggaggtctgtaatgcacatatatccacagataatttgtcataaaatgatataaaagcacgaaacataggactgaaaccaaccggcctgaatcggtcagctgatgtcgtcactggcatgtgaaagtgggactttgttgacatgtgattcagcttcccccagggcttttctccaatgacgaggttgcattacttggacttcgctgctgattgatggcattatgtctttgttcactgtggctgacttgtctaaaattgtctctttgtcactagtctttggttctgtgactgttattattctttaaactcgagccttgcgttcttattctggcttcacatagactacacatacacatacacactaccggctgaactgggtagactgactagactcagccctaaccttgagaaatgataggtatgcaacatgtatcccactgcaaccaaccagactaatcgatgttcagaccatgttttggggaggccttcgacccgcttccgcaagatccaagtatttgcagtggtttccttctggtcggtttacttattaaggtacagcatataaagtcaacatctgtctaataaatcccaaatgctgaacgtcgaacagagcagatagacatggcccgccgtttattcgatcgctctcagcccgcctcacaggaaagttgacagcatggcagacaacagtgatcatattcctctggctctacctcagccggaacttcgccaagattgtcgggctagaatgtcctgaaccattggcaaacatgtactcgcggtccttcttccgagcaacatggataaccactggtttggatgctgggttttggaccgcgatgaacataaagtcaaaatggctccgagatatagcctcactagtattcacagcctactacctaatcgctgctgaacaagccgatgagaaggttcgccgggtccgtgctaccctgacattggagcacctgcgcgtgtcttggaataaacccaccaccccttacctgtggtcattggcaaaactgctacggccgcgaatgactcagttcccggctcgggcaattcgaattcctcgcccggcacagtctgtgtacaccgacccagtgaatgcatggctttatttcgatggtccgttgagtgcgctccgagatcagagtctcattgtgctggatgtacctggtggtgggtttgtggctatgagtcccagaaactcagaggacaagctattgtcttgggcgggacggctcaaggttcccgttctgagtatcgattataagaaggcaccggaattcgcatacccgtatgcgctgcatgaatgctacgatgtctaccatagcatcattgccacgaacggtcgttgtgtgggtctgagtggtagggctcgtcctaggatccttgtcactggcgagagcgccggtggcaacctggcagtgggcatgaccttgatggtgttgcagtctgcgatggctcagggctggcgtggggatgatgtgcttccggccccggatggtgtggttttgggataccctgcgttgaatatgaaggttgagagctggatgagcgatgagcagatgtcattgatccaggagaagagcacccgtcagacaaaccgcggtgttctgcaacggaaacaggatgaataccgtaaactcacaccattcacatcgccaggtcgttcggtcgaagatctaactgctatctcaccaccggagaaggcaaaggataacaaagaagccaatgtggccactgaagcggccagagcactggaaaagaaactccaaaagagcgaggacctagccccgaagcctgccgttaaagcagaagatgaagtcaaaccaataaagaccagactagccgtctcgtccatgattacctatgttcacgaccgcattctcacacctgagatgacacgtgcgatgatcattctctatattggaccccaccatcgccctgacttcaacaccgatttcctcctgtctcccgtcctggctccagatgctttacttgcccgcttcccgaaaacatatatcatgaccggagagcgagatcctctagtcgatgacacggtgatatttgcaggcagactgcgtcaagcaaagctgcatcacttccgtgagcgccaggacctagggttggagagggccaatcgccccttcaacgagcgaaactacgtcgagatctccctgatccccggtatttcacacggcttcatgcagatggctggcttcttccccgacgcgtggaagtatatccatcgcagtgcggactggctagaaagcctgttccaaattatcaagactaacaacttcgaggcggatttacttgatcctgaccgggatgcgagtattttgaatgccagtacttccctcaaatcaaacgccccaaaaagcggacgtaaccaccgtcgcaagttcactggcgagtcttcgggtgatgacgacagaccattagagatgagcatgagcaagaccacgcttgctagtggcgaggatgcatttgcatcaaagcctgaacaccgcactcgtcggaggagatcacgttcctctttcgcttcctcgcggattacagggtttacatcgctaggagatgaccgcaacgccaaggaggatttcatcgctaagctccgatgcttggaaagagcgggtcgttctgaccctttcgatccggacgagacaaatagtgcacctgaaagtccgagtatagttcgtccgagaagacggagcatcgcttcccttgatagtgaagaggatttgctggatcgtcgcatgaacgggctcgctggtgggttgatggggatcggggaaggggcacagactcccgggctgtgagaggacagggctacgatttatgattaatatctgcgtttattttcggtttagagtgggatcaagtatgtgttggaaatatataccttctacctgaatcggaagatgtatatgtagaacttcctcagattgtgtcaccgcatatgaaggaatcagatttgtttaaactagagcaattagggtgttcattcgagggtctcacttgtgtgagtagtttcttagggcatgattccctatttccataacagcccctctcggtggaaaggtgagatggttacatatcatgatctcgacaagaaactgctgcgatatggggaatgtaagaaatccttttaattcaggagggtcaaagacgcaaattgattttccccaggggcccattttctttcaagaaggcagctcgatcttccagaaacgctttgtatggcggttttaggacagtcttctcttcatcctcccatacttgatatccgacttcgtcccacacttttgactactcttgcagcagctgttcctcggcccaagctttttaagagaggtcagtgttcttcacgctgaacagtgaacagtttcactgacagaagtagtatgaggaattttggacgaatgcatccaacgtgccaatcatgtggattggtcttccgttcagcatgatctaccttgcttatataactactgatacattcgatgccgaagtggaacatctatcgcttcagatcgacccttctcgacagaagatcgtccagtgcctagtgctaggcgagtacactagagcaggaccgtacgtcttgcagacagtcattaactacgtctatgtcgagttttgtcttcgaaccgacgtggatcaagatacctggtatctgctggccttggaggtaaacctggccatgcggatgggctaccatcgcgatcccagtcatttcccaggtatttacccctttcagggagaatgcgtcgccgactgtgggcgacagtgctaatgggtgatatacttgtgtcaaaccaaatgggtatgccacacatgatctccgactggaaatgtgacacaatggaaccgcgaaatttgaatgacacggactttgacgaacagtccaccgatcttcctccgtcacgtcccttgaccaaatacacgaattccataggacttatcgcacgacgacgtatccttgcagcactggggatagtggccgatctcacagatgcagttaaaccatgtagttatgcagaggtgatgcgcgtcgacggcgtactccaagatgcggcagccagtattcctcccctcttgcagatgaagtccatggccactagtgtgacagattctctgcaggtcatcatttcgcgtttgttcttgggtcatatgatctacaaggggcagattgtgcttcaccgccggtttctatatacaagtccggacgatgcggattatgattcgatgagctactcgcggaaagcctgcttggccgcttcgctgggtatgctgaatatctaacatgtgcttgatgaggaaacatgtccaggtggtcagctctataccatgagatttcgagtggcttccattatgaaccaccagttcctcactgctactatggtactatgttcaattcttcatcgtgggaagacgatacagcgggaacaagatatacgggcggcccttcatctttctaggttcatttggatgcgaaagagttccacttccaaagagacaaagaaagcggccgagactgttagttttgtgctcgctacggccggcgacggtcgtaaacctgacctcgcttttaaccaagatatttcccacggtgtacaagacaatgatcaaacgaacgctttccagggaagttgtgccaaaggcacaggccaaaattcagacgaggaactactatttccagacaacatgagtttatttgagcgtaagtctcagataccaaacctcctctcttgaccgatctgaccaaagctgtagccgaccattttgttatgactagctcccttgggatgttcacgtcgcccgcccagcaaaatcaacactttggggttaattccaacggaatagagagcccatttgaggagtggatggtgatgaatctgcctcagccgtgatggccatagccgagactacattttggatccgacaactgacttacgagttttttcataatagaattatatagagactttggaatgaagatttcaataccgtgcggctttgaattacttttgagatatcatattaattcatttttacacactttttgaaccctttctgggatagttagtcgctacctatagaatgggataaaaagaaacaacggcttttgatataaaatacttgcgtagaagtgattcctcaactggctttacactatgaagccagataggctttcagcttacaggaaatacacatgagatgactcaatggcggaactacagcatcacttcggagattgtttactatgtctatatatgtacctgtatgtaccggattttaggccacggtcgcgaatttcccgattggggtgccgccgcttttatgagggcgctcaggctcctgctcactgagtatttcacagcacaggtgatcactgtgagcacttagggtatgcttagtaatgtaaaaaaatactgtttagtacttctcaaatatcgctcagtgagtgctcagtgagtgctcagggtatgctcagtgagcactcgggtttgctcagtcagcgcacagacatgctcatcttgatggcctgaaaataaaggcataaaatgatcagatgaaatcacgtgataggtggatcattcatcagccatctattctgtgcaggctagcgcccagcaattaaaaatctttaagcattgaccgtcctttttgttgattgcgtcctgcattagggaatgtattcatcaatatgaccaccgtaaaatgatgacgtatgaagatccatagctaattcaggtaccctatcctgactatggctaggatgactttcacgaggtatctagcatctagtcgggctataaatacagcgaaacccccccccaaagacaatcgattattagaactcactatttcctttcatccccttcattctccttccagcgtttccagcgtccctatccaatcatagattatgggcatgaagcggcagacttgcgatttagcaaaggaacggcgtcgcgcgagacgcaaagaaactgggttccaaccggacgcctaccgagaggatgatgccatacgtggtaaacataaacatactgacgagtccaaagcccttcatctgcagtacatcgagctctggatcgagtgagtagcctcgcaatgcttttccctcatttacttgtttattgacttttcaggtttttgattgaaagcggaagagtaactgatggttatgagctagaaaagggaattccggcgcccaaaattactgaaatcaaagaatttattcggtagtatgcgtattctactaaaaggcgtctcgacctagatagaaggcctatagtgaccactactttagcttacgccgagagacttttcggtagctttgagacagctataggaaatacagttactaaataggatcgctcagagacgtacagagttagtatagtccgttttgcgaaggctttaagtattaaggctgaccctatcacagtggatcagcggaactctaaccaaacaaaaagtcattataaaaaaggaaaaagaaaagttcaatttcataaagacggactatacctataccgtatcttcaatctagatggtcgataatcctatcttcatctatagaacaatgaaagtatttcttctattcgctctacagctttatatttttaccagtataagggttagagcattcattccgagaaataagcactagcaagagaggggtcttcgctataaggtatatccaaccctatctatatattctatctagctattaatacttaatagtacatagacctcgtcttatttcgttctacttcttctaacgaaccataggatattaggtagcgagtcaatgaatagtggctcaaaaaaatagaaacctagagtatactatataagttaataacctcattccctaaatatactactttatccttttattccacaaacgctaactcgccctatagctttagcataggtatctgtgatcatagcagaccttaattcgcattaggactgcttcttactagcattagcattaactaaggcatactttacagaatcaatacccttagagatttagcccaaatacggttactcgaagggaaggataaaatcaccctacgctggaggcatgatacgttagagaagcctatattccggaacgtgactgtacaggggatacaggatttgacgttaacaatagaaagattctgttactttcttcgccaaaacttcaggaaagcgaattatttcaaagttccgaaaattcatgatatctatcgagcgcttaggaataaagtcgatagtaaggccttctaattacctacaattcttaggataaaatctcacatttaataagtcgatacggcttagcattagtctcacaactatatagctataaagacggaaaaacctatgaaacgagctgtatagcccactgttcgtccattaatactatagcttatgtccttaacgaggagaaagacgatcgctattataagtaattctgtaaacctgatttacctggctacctagctgctaggattaaagaatctatcttagaaagtgataagcttactaaaataagaagccgtattggctcggcagatataactggtaacaaagacctagaaaagtacaagagactataatataggaaaacctatactcgcctccgcctttcagctcctacaaattaccggacctaatatgttcgtaacaggcaagattagagggttttatcaggagggcaaaaatcacctaacgagccagaaaggaatgcttgtacacgtgcccttgcgctcattatacccaaaattggtcgcctagcagcagtcatatcgcctatagacccgatgtcatttaataagaaactcctcttcataaaggacttgcagaagcagtattcgtgggactacaacgtaatatacttaccaaatgaaacacctgtcaatggaaaatgccctattgcaagctgccaaggagatgttcactcgtgagtaaagaatgtcatatgggatgattaatactgacttgcccagactggcgaactccagctgaagtagatatattcatgaatgcatccgcggctatgaagcttctcagtttagagttagcaagttggacataaagttctactacaaatgtatgcagtggtttcatacaaagcaccaatggcgagaacactgcaagcatcacctacgttgatctgtattaattgaaccatggacgaggctgttgattttgtagagagagtatctgagtactgaccaataatcatgaactgatttttagttgattgatctccgctgtttcaccaccattttactatgattggcccgatttttttgacagccgagcttatttgaacctcactgagttttttttcggtctcaatcttgaaagtgtatgagagatcagagaaaacatcagatttatttcattttcggttctatggatttttgtttttgcttttcttggttcgcgttccttcttttcccagaatcttggcggcctaagtagttgtttcctggagtgcggtggcggcgaggtgccgccgactaagagggcaacggtacttatttttctatgtgaaagctataccacattacgccatttccatcaactacctctggtagagaactcagcatcattcttcagaaatatccaattattagtttagtgagcaacatttctgtggatcgttatacgtctgaagagaacctgtggctattcggtcggattctctgctgtcacacccgttcaacgaagccaggtcaccacggaacctttacccgcgcatcgaaagttcattatgtcgaccagcaatgacggcatgcagacaaatatcctggttccggatgatgcggtaaccctacaaaactcggggctggtcagctctccttcgtccgatggaacacgtcgtattcataaacgacgtttaaaccgatctagcgatgaagaagaacagcatcttccgctgacccccgtatcgatctcctcaagctccgattcctttgtcagtatcccggatcatctcgtctctttggccgcactcgagcatctcggctataactcggaaactgcaactcttatctgggagtattggactaactggccacctggggagcctaagagggagactgatgacactgataatggtgtcctgtttattgacgtcgccgaaggtcaccttgattattctcccgatacctgctcagagaatgatgccgaatggttccactgtatgaatctatatgggatcactcgcgagcttcaggaggcaatcatggatcccaagttccgatcgatccgcctaaccgactcatgcaagtcctggattcgggacacctttcagttacgcaaccgagccctccaggcggtacaagaagcttcccgtgagcgagatatggctagtcgacgggaagcttcccgacctggacaaagtagttctggacggcgatcaatttcagattctttgagaatggttccttggctatcgcatgaaaccgctttatcggaagctgcaacaactgcagcttcaagagcaccgggccatacaaccatctacaagggaattgatcaagctcttatcacggaattattcgaccataatggcaacctagacttcggatgccttatctcccgatcacgttgtgatttctccggaagacaggacgatctctacttcgctattgaccgagaagtggccgaactgtatgcttgctatatcaagcaccgcagtacgtgcagcggggttgtcattattcatatcagtatcccgaactcggtcattgagtccctctctatacccgatatccaatttaactattggcccaacgcagaatggaagtcacttatctttcattgtcgacaggggaaaaagctcccctctaagctccggaagtacaaacttgctaagcttataattggaaccatttgtggcaagccaaaccttgttattagcaggatgcgatctccagatgaaatcacggagcacatggttctgaagactagcgatggacgcaacgcagtccagtacgtgttcaaaggggacgatggagatactttgttagaggagtgcagcagcgtaactgtgttccctttaacatcacgacagtttcaggcctggcttgagcgcgtctgagttactttggcggaataccaatacttgttccccaccacgaaatggcttatgtatttgttggactatcaattatcgagttgatttctaagcattttttactgttaatgtacctagtagtgtaagcctaggttaccggtctagccaatagttatctagcttaggtcgacgctagataggcctggtagaactagccttttgggtattctgagattagtagaaaagtttctaactgggaatacctataatatagggaccaagatagactacccttctggtccaagttggaggattcctaagggtaattctattcaccgcctcatttgctagccagagaagacgagtgatggactgatatgtgagtaacccgcataaagcaatgtaagggtataatgaatattatgacaacgccaatcacgctccatgttctatgaatacttttaccgggatgagtttataatgatgcacatgcttgattaatgcttctgatgtcttcattctcggggatgtacaaagtaacgttgctagttgacagaccgaaatctgtcggggccaatgcccacgacgatgatactaccaacctccttccgtccagcagaaagactaaaatacttttttttttctttcttccttcaatagccatcgtgaacttcctcacgtgccaacccatatcagatggttctgcttgtttccccaactcccgattaaagcaaaaagcaaagggtatccgcaggtccacattcccttccctgttacctcacaacgaggcactcctatcttcataagttagtttcaatgctttaatgaaaatgtactttgtagcttatgtaataatcatgtgatgctcagtgagcgggtttaacgattacgtaatactcaggggcgtgctcagctttactcagtgagcaaaaggcggcaagggggtgagcactaaaacggaaagggaaatccatctcgctcggcctaaaatccggtgtatatgtctctcgaaggcggaacatgtccctccgctctcgttaagtttggcagaataccagaaatccaaccctccaatcatcagcccctatcaggctccatggtggagaatgactgtagccaatcaaataacaagacgaagtatataggaacaacaaggacaggatgtatgtacatggccatgaccttatctgatccctagcacgtagaagggaaagaacgacacgccgccttccaccgtcgcgtcagacgtgctttgtttacttttcatcgtcccactgtctcctggtcttctctatctccatcccactcttttcgcttcagccgactttgaatcctgatcttttcccattgttttattctcaatcattaccacttcactctgcctacactcgggttgggttagcagctgcaactccaccgcccttttcagtctccgtatcaactacatttggccgattcttgacgcgcaacatggcagctggagtctgctactggagtggcaacggctcttattgctgcccttgtcttggccaaggacagtatgatgtgaatgacttatcgatatcttgccgggagtgtggacatccacttaagaatcatttccaaattgggcgtaagggatttcttctctctgccaaactgattctaattctctttaagcgcacccaagtgatgctagtgctagccaagttttgctaccgagacaccaaaccgtgaggaagcttgccaatcgcatcaatgaacaaagagtggtgcttgcccgtggaacgccctcgtcgggaaagacctttctcgcccggtctcttcatatttaccttcgtggacagggagtcaagtcgatttggatcgaacagtttccccctagtttagagggtggtcctaccgcgttgcattacctggtcgaggcctgtcacacccaaggctatgctgcattcggccacaacgttctgctcgacacgtttgtgtttatcattgatgatgcgcatatgacttacaataactctgagctgtgggtacttctgaattcagtgaaccagaaccgtctcgcgaacataccaggggccagtttctgtttgttcggtgcatttggcacccccgataggggtgttatgccacagaacatggggagtgacttgatagtattcaatgagcgtcagcgtcttttcttgtccactaggttttccgaggacctcacacttttctacacccgagaagaattcgatctctacctggaaatgcatttccaggctcgaggttctgattacgaaatttgtgagatcttgaaagataccatctttggcttaaccgacggccagcctgaattgatggatgcattcatgcatatctgtgacatggtatgtgatggtcagtaatgtctgatattttctgtcatgctaacatcttgccagtggtatgaggttctctacaaggatgacgcggatgacgaaatggaaaccataagctatgatgactatgaaatcatgcaattctttcaaattcgcggcatcatggaagcaacgatcgcggcaattgtcaacttcgcgggtcttccactttctcccgaaacctttttccctcccgaagcagagtttgaagttcttcgccaggttcggcaaagcggtgattacagcatttcgttcaacccacaaagtgaagctatgctgtcgtgtatcacgaaaggttggctgcacatagaacagagccgacaaggaggattcagatgttacttcccaacctactttcacaacaagtacgagacatgttattttcccaagcctggtatgcgtactaatattagaacagggtcgtggaatacctcatgggagtccaggatcttagatatcccaccccgcctactttggacagagcggaacttgagttgatgttgagcatgcgcaccatgacgatttcgtaaaggaagttggctcatgcaaatgccgagaacagcgttcgccagacgtggaactcacgctagatattcggtgatatcatctttctgagggggttgctaaatttgtgtctgtggatgatgagcgtgagttcgaggaatcctcttatgctgcatcgtcggtttgtgtccttttttaccatgttatcatgcgtaaaacgtaagtataatttgtggaaatactgcagcaattcaagttgattttaatttgggtatccctgtaactatcccctatgttgtaagatgtagaaattgagttatggcgactattgtagggcggtggacaaggcggtatgtagtatgtaaacggcggacctgtgaattactgtatcgggttagttttgccgttttgggtttagcgccccaatacgctgtcacgtaacctcccttcaatgccgctgacataaaagacccgtcttcgctgctcctcctccctttctctcacttttccattattctgcctctctatcttgcacttatcgccgccccctttcttttactccggcccctaccgactactgtacatttgctttcagcccgacgtactgcccctttcatttctaccggagatgccgcttaatccgacatccagcttgcaatgcctattacccagaagtgtaactactgggataatacagcatcctgttaattcgtgttaataatcctactccttccctagggcagtgactaagtaccatactacaaagatatctaggttaccctctgccagtacgccttttcgtctctgattccgcgggcctctaaatctgcaaagtgccagtataccctcgacgctgcatatccctctcccgccgccctacctgaggttgcattgcacagcccggctttatagaatagctcccagttgcctggctaaacgcccagttatcgttatcgtcggtctctccggtccctctctacctagtcggtgaaaacttgaaatcacagctcggtcatatgggccaatagcgaaaatgccgtacacgccctagaccttggtcgatactgtatcttgtgatcaatgcgagactgtaactgcgggaattgttgttataggctgtgaaactggtatagtctagcgtcctcgactgcaatgggttagatagtaggatctggttgagattatctactcctggtagaagaaggattctatcttccgggcctccgtcgtcattatctataaaagagactacaattccataaatatggtaaaactagaattcgaatcacctttaaatactcctcttcgcctgttcctattctctgccagtttttttttttgttttatgagtgcccatagtcactatatcctaaagagtctttagccgtctcttcacaatatatattaagtgtgagttttccctcgtgctttttttttcagccacggaattgcgtatattgcctcacctgactggacgctgatcctcacgctaagcagccctttagagacgattcctttgctatggccctcttctggcgaggtgtagcaaggcagaacgtggactttcgaatatgaaacgctttgatctaatgggagaaatgccgtatataccgtcggccttgcgcgtgactccttagtgatttccgttgtggatgggttggtggatcttcgtatcggcaggctgcgctttgtctcatgactcttgtcaatccaacctgctcaaaacgctcagaggaggcaggggacggtaggcaggtataaagggtcgttggaactcctcaaaccgagaaagaggctgactatctgtttatggttccttctcttctattctgatgtagggtctactatatatactgctgcagcgacaatcggatgttccaatcgttgttatgattttttggcccaatggctaaatcctcttatataattataacaaacgagatttccatacacacacacacacacacacaattcattaacgcccggcggctgagccgaaagggcaactatcgctaaactactatacatgtcatagtatatacaattctgtgactcattggagcccatacacaagaccttggcgtatttgtcattctcagcatgcagtgtcgcagcggatgctcgtgggttagtaagttggttagtagactggcttgaaggcgcttctccaagtgttcaacatcctatcttcggcagttgaagcgcgtccaccgtgaatagcacgaggtggttggtgggttagattagaatgaaagaggggtgatttatgttcgtcggcggggttaagtggcctcgaggcggcctgtggctatggcgaatcgtattgaggcccgtactgcctctaagtttggcgtccacttttgatcgtcggaaggcgacttccctcccaggtaaaagggcagatttcctcggtgagtgtcggtacattgtagcatatccgtccggtgtgtggtccacttccgacatcgaaagaggaagtgctccacagtttccttagcttgtccgcacgcacactgatccgtgtcggccgcgttgattcgatagaggtatccattcagtctcgccatgcccgtccggagttgggctagcacggtcgcttccttccatgacaagggatcatacagctgtcgcgtgtgttttcctgggagtgctgcatctactcgtttggcgtgctttccgacgtccgctggcagggtatttctggggactgcttgagaccgtgcgagattcagcgtggttgattttatcctcggggcgcgttcttgcaagagggcatcttcttgtgtcgcggctctagcctgttctttagccagacctagcagcttgttgtcttcactggcagaaacccagcggacttgaacatggtttccgtttctctgcaaccttttaatcaacttgtatatccgacacacgaactcctggccagattgttgtcgagggttcctgagtgtgagaaccgccgctttgttgcttgtgagcagtgcgatcgtgtagtctttcagtcccgtcgccgtgctcaatacatgtgccatggctgccagttccgcagagaatggattctgctctgcccttacagccaaggtgatggatagcgctttgtgtttaagcttccgattccgaggtggtcgcttctcgatggccactccaaaacccaccagctcgtttcgtgcagagctgctaaccgcgacctgcatgcacccgcccgcttcggccagggactcatgctgctcatcaatgtcggtttgtacgcgttccgcccacggggatagcgtgaaggggttgatcgtttctaatgtctccatgtcgatgtgcttgagcgtatcggctacgtgatacagtggtgagcggtggtatcttctgaactttctgatctgatctgtacaccggcgaagaggattggtttccggcaaggtgtggatgtctgtccacattttcacggctcgtttccaaaatcgacgttgtgcagtagccatgtgagcctccgcctctgcgacactagtcgcgactgtgagaaatgtccccacaatggcttgcgcgcctactctttggactcggttgatcggccccatggctttatccttgcacgcgtgcatccagacattggaggcgtagtccactactggtgctactgtcgatgcgaatagctgtcgcgcggttgctggggagaggcctcggagtcgccgaagctccatcgctgcttcgagacccttggacgctgctctcgcgatatgctccttgtacttaagtctcgtgtccatcaagacacccaggatcttaacgtggtctttgggtaccaccgtctgccccttgatggtgaatggctcatggtccaatttacgcatcttgggagcaaagtgtatgatagccgtcttgtcagcctcaaatgtcgctccgcttctcttttcccagttgagtgcctcgttgatgatggcttcaattccttcccggttactctgcgcagtcggaccggtcacccacgcggtaaaatcatccacgaaagcgactgctcctccctggctgtcgatctgtctttgcacgaggtctgcattgaaaaacagaaatagaatcggagacaggggcgagccctgcggcagcccagcttgtggcaagctttgagtctcagataactgcccgttgatcaggatatttgccgttcgttccgagcagaaggccccaacccaacgaagcaagacctccggtatgcctcgggctttcatcctctggatcagtcgttctttgcatactccgttgtaggctcccttgacatcgaagctaatcaagctcagcactcgtcggccgcgccacgccgcatagatctgctcctgcaggaacaccagtgcttgctctgcggaccgctgctttcgagccccaaagtggctcccccggcggcagtccatgcgtctccaccgcgtgcgagatcctctctgcgatcaccgattcgagtatctttccgagtgtcgcaaggagtgagataggtctccatgcctttgcaatggtgtagtcatctttattcggcttcttgagcggtatgatcttggcctgtctccactgtcttggcagtgtgccctcttgcagcgaggcttgaaagaggtcgaggaccctgtgcttgactgagggccacgtcatcttccaaacgatcgccggtaggccgtcttcaccaggtgccttccacgacttggccgctgacagttgccgctctatctcctccatagtgacggctggcatgtccacaggcgctctttgtggtctcactccttcctcgtcgatgttctctggcaaaggcgggaaaaacttggatatcaattcctccgcttgctccttgtgatcgttcgtagtggttccatcggctctgaggagctgcggaatcttcccgaacgcggcattgtctcccgacttgaggtacttggcggctttccagatgttgtcgttgtctgcgagaaactcgttccagtgcttcttcttttgtttgcgaatggcatcgtggtattgtttggccgcatcctgggccatcgtttcgagccgggggacttttcgccccgcccgtcgctcggagcgagcacggtttctccagtgcgtatatatatgacggagttgagtgaggtcagctgtccaccatcgcttcgcatgtggtgatggtttcgccctcggggttaaagcgtgtaccgcttcggacactgccaacatgagtcgatccgttttctgctgtaccgtgccctccgacggaaggatggctagagcgttctgaatcctggcgttaatctccttccatggtgcattcttcagtaaaagtcgctcttggtgctttgggcccgaccactgggcgtcgaacacggactcaatggcgcagtgatcagagccgtggtctgtctcgagtaaagcacattttgtcatggagtccgtcagattttctgaagctaggacgagatcgatggtagactcgcagtctccactttgtccgccgccgtgccatgtcttggtgccgcgtttaagcaagctactgagcgcaaactcattcataaggtcaatgatcggatccgcttccccttgtcttcccagcgacacctcgtctccaccccagagttgatcgtgtcggttgaagtcccctaccatcagaatctccaccacggcgcctgtctctcgtcgtacttttgtgatcgcatcgtgtaaatgattgcacgcatcgtccaaggctgagatattgcctccttcaacgtaaaccgatgccataaagatcagtcgctcggggagcctgaccatcgctgctgtgatgtctggagactccacagggacttgctccgcttcgacttctttgttgacccagagcatgctccgaatcgcccatctcccctccctccaggtagagggcaccatctttgtccacttgtgatgccccattggagtggtcaagagccggccttgaatcctcctcgcttggggttcctggatcgctagcgccaccgcgttttgagtgtcttcgtcattcattaaactctcgtgcactgcaccctgcttcctcacgttcagctgaattattcgaagagaattattcatgacgtgatggatagagcttccggcagttcttgctgtacgattcgtgaggccctccgcacggtacacactttggaaccggttggatacagtcgctgtggcgatggccctctgtagcgcatttcgcgcatttctgggcgttcttgcactggaatgccttatggcctatctcttggcagttgtaacattgtgtcggtcgcggtcggtgttcgaagacactagtcacaccagattctccccccgcgtggaaaaatccgtcggccaagagccttcgcgcgtcgatgcgtttggtcaggtaaaccaccattgaaccgtaggccttctcgctctcttttctgctcagccatgaaatcttggctacgttggtctcattctcctcactaaacgctgctgcagcctcggttcggacctcaccgctctcgtctagcacggaggtcttgttgacgctatcgactttgatcgggtagagctcgtcacggaggacccgagctcccgccccgattttctgttctgcaacctttttgaccagctgctgttcatcctcatcccggcaggcgatcctgatccggttggcgtttttcgggtcaacggtaacagcgcgacagcgccagtgcgcgtggccctctgttaactgtatctctgcctcaaccgctgctctgaccgagcctgcggaggtcgattttgtccctttttctgccatcttcgaggtatctatcgtgcaaaatagcgtgtccgtaaaggtggtgggtgtcgtgttcagcgttaaaagggaccgtatgttgcttgggtaactggacggcggagtgcgcgcgacatctgcgtaggaaggagagcctgcaacagcgggaacactgatttcctcgcgtaaggactggatttcgcgcaggatcgcatcgtggttgttctgagagcacgtctcagagtggcattgcggtgtcgtgtttctattcgtcagggactgtagctcgtgtcggacctccgcgagggcggtaccgaactgttctctggttctctgaatttcttccttgtgtatttcgtcacggagtctgatctctcgcctgagtttggcgatctctctcaccaaaccgccgacgtcgagctcttcgcgctcggtcgcggcgtcgtccgaagttacctcgtcacgccggtctcctagctcaattctctccttttgctgggaacgcgtctttcgtcgatcagtgtcaatttcctgctcacgagcgtagttgttcggtggtcgagtggtgcgtttcggtctcgccagtcgcggtggcgaatcttcgcgttcgtcacagtcgggcggttcaggggttcgcatcgcggcccgtcccgccattggtcacagtaactcactagacgcgctcgaaatcctgatgaaagtaccgagagacaagctacagtacttcccgaaactctttatactgtacgagctatacagtacgtctccgatttccatacagacgcgctcgaaatcagtttcatctctacactctctttaattctttactgaactttgttttgcataacgctatgcctaatatagctagattccccctgacccacacttttggcagtatcttagtacggtaatatataatggcataaaaatagctatcgtatcatggttgtatgggctatgcgtgtctagagccattcacttgcaaacaagccaaacagccgaggtggcaggagattcggtcggttatctggccacttctcacctccccctttagctaaccacgttcaatcgactattctacaaatatagtggacgagcgaagacatacgtagatacaatactggtaggacgaaatattttttaccaaccgacttacctgccctacaaatgctggattcctttagtccccttctgttgaacactggatgaccactatgtgctgaagttcggtttattaggaaattgaggacgatgatcaaccacttctatcccaatggtgatgaattccaagctcaggatctcgatccgccggaccaggactcgcaatacgccccaactccagggtattacgaacacacgccaccatcagaatatggattcagcccttcaccgaaccgttgcccccaggacggttccgaccccgtacttttaaccccaccagaaaccaataagctgcttcagctctccgagtgggaagcgaataggccagacgacgagcttcccgcaagctttattcggtatactatcgagtggaaagtcaaagtgaataatcggtccatatcagaggatacggagcaggacgtagcgttgaccccaagtgcttactggcccttggccctcagggacaagctgtataaggtaatcgaggagaaagttgcgcgtaaacgaagggtcaggtccgacgacacatccattgttgtgtcgatcaacgatcgcaagcaacacgacctgaaaaagcggtttaatggcctcaatattgactggtccgccgtggaaaaacaattactcgtttgggggaaattttataccagcggtaaagagttgcggctgaggataatcttcaactatatagaggacgaccactcccctagaagcgtaacaggcagaaccgacaaaagaggaaggtcatctgttaccaaaaggatgcttaacgagcgagatgaataactcgacgccgaatagtatacaactggggaacaatcgatctggcgggctgtctacaacttgatacgttgcccttcgccgtcttgtcatcttggtccgcactgctggcaggacccacatgggaaaaaacactattaactaaggacacatcatttgaaacgcctgatcgcttatgtcgaaggcggtggcattctggagtgtcaagatgatgtccctgacgctgttcgcgaagaactcttcttagaagaacaacagaaattggaaagtctacaatctaagggcaacaaaattctcgcgccaggaaattgcccgcctatcaatatcaacttcatgggagggcaacctcacctacaatcgccggcgaccaactcaattccagcattggccacacctccaccgcaaaatggacagatagtagatcagctcataattgacgggccccgagatgtggctgtgagggaatacaccgcgtggcaagaaacaaatgttgttgacgacaatttgaaggctcaatttcgacaggcatgcgatgtaacgctggccaacggtctggatcttgaacagatccatgaggaccatgaccctgggttttttattgaaaaaggagttgcggtagggattgcacgccgcttcataagcgacatcgatagatgggtgaggcacgtaagaaactgattgcgcaggttcgcagtcagagtggctggcaaggcgtgattagacttggatttactcatttatttgctttcgattagatgtacttcctacaatgtagtcctaggcaagatcaatacgtaatgcatggattatctagtcaaacttgccaacgaaattgtcttatacagaactagtgttgatcttgtcagacaaaaatgggggcaccccgtttcatagatacgggtaacctgatatacgaggtgcagactattcaggtgctctaacagatctataatcagccccgacgctcaatgatagtcttcaacaacaacgccagcatggcgaaagtgacccgttgcacttcgttctcgagatccgacaacctcgacacaccactcgaggaaagatgcgaatccttggtcaggtctttgttcatatcgccgccaattacgcctgataaacgccttcaattcagagaaaaactcctcgataggattcaaatcgggtgaataaggtagcaggtaaaccaattttactcctacagtagcacatatttctttgattcactcagaatgatgaaaagatgcattatctatgactaaaacggactttggttcgggccactttccgcaatatctgagaagctgcttaataaagtcctcaaaaacagatgcatcagtcgagcctcggaatacctgagaaaaaacaacaccatcttgggcgtatacaggaaggatctgatatcgctggtcacgatggaatttggatacctgcaaaggggtcgcacctaccggagaccaaccggtccgtctaaaaccaattcgtttatcgtatccggactcatccatatagactaagtgataggattggaaatcagataggttgtgtaggtagaagtctcgcagatcggcgttttgctcctttgctctttgtcgagccacctttttcgaccagccgacagatgcaagagcccgcttgagactcgaatttgtcacctgaatatggaattcatcccataaaaagagcgccatctcgtccatatacaacccaggcttcgcaagacggtgatcacaaacggcctctagcatcggaggggtaatacttcgtcttcgtccgacccgagttagaggcgctctgacagttccgaattgatgaagattgttgcggatattgatgattgaacgcccactacactcagccgcttcagtaatttgtgatgtgttcagggatttgctaagtatcatgtcatggatcatctcgagcttcgacggtgggagcctaggcgccattttgcggagggacgatagaaggtgttgtgggtggaagccctataaggcattgactgatgggcaatgttgggcaccatgtggaattctccatgctcacccttgctcacccttctgctcagtaagcagatgaaatgacttttggtcggacgtctgggggatggtggggtattgggaaatgcacgtgaccctaagtctcgtagttcccaggagcatggttgtttctagaagaacgatttaaaaactgagggccctcaattattacaagctaggggcaaagtgacaataccttagaagtcattgatgctagatcgtgcgcttagtttctcctagctgattgactacaggatggatggatggatggatggatgatttcatttacccccgacccctcgcagagcgatacgcaggctacagcaactatatatatccgtatatgtacatgtatcgtgtcccacttcctgaaaacgaacttagagcctatcgtggcctagttgccgctcctgttgttaggctgccctcatggcgcgcgactttggaaccgttgtgacgcctctgcgaagtctagcacaaccgtgaccgtcctagcccgagagacggtgtctggcttacctctctcacaccatttgagcctcccggcagactcgacacgctgttaaatgcgtccccaccttctctcttaattctcttcttgatccctgtagtgttggacagtccaccaagacgtgggtgactgtttcttgcgcgacgcgcactgatcgtcgtcgcggaagccaatggccttcctgaaggtggataaccaattgtgtcccgtgcgtagctggtgtcagcttaactatgtacggttcgttccgccacgcactctcatgattcgccccctgcatttcctcttcgagtctggtgtgtcagggcttatggttcgccgtgcatgcatgcaatgcatctgcacgttttcctctttgtgattgcttcgatctttgttctaggcccctcttttactaggacgctctattgcttattgccatataccgcctcgacgatattattgtcagattagatagaccccgcacatctgctgacgagactgaagtctgctaccaatgctcaagattgcccttacgcaaaaattatccttgagaattagaatactcgttgaacaccttttacttagctcactgatacatcacctgcaacaaaatggagtgcctaggtgttcctattgaccatcgactgcggcgagtgattcgtgaggcaagacgtatcgatcgggacaaggaaaattccgaccatattcagcttcttcatagctttggatcatctctagaggttgacgagagtgactacccgatatgtgacctgagcttcggactcgaaatggcgcgaccagaattgaagggtggtgtccttattgtactggaacggcctcattcgaaacagaaaaactcggacggatttatggaaggcaaacgcaactgccgaaccattaatgcagtgtcggatcttatttctgctgtaaacaacgataagttgggttttgacgatgtcagcttatttgatgcaataccttttctagatgagacagtcgcgggaaaagatcaccaggatatcatcaatgaagcacagaatgttttcgccgatatggctagggctaaagaccctgatatcattctatgctgcttcaaaactgagactcaaaactctcttgtcaagaaacttcagagccgaggagtagggcggagtttctaccctgataacccaaagcttaccggatttggtttttcgtctacccttgtgaatgcatttcacccaagttacgctgttaactattatccaatatcctcttgcttcaagcaactcctggttctagagtttacgaaggcatttgctctttggaggcagagctggactgaagagccatggatgaaggggttaagagatgaatgccggatcagagcaaaaaggaaagtcggtggtaagaaagtctaacgtgatatactccaacactttctcattgcattatacagaaaagaatatcgacgggaaatggaaccgatcgtatatcaaagagcagtgggaagaacttcttacctccctggatgcacagtttgaaaaatgtttcttccaaaatcctaaagatatcggggcaggggatttgcagcgcaagcttgtggattcaaagatcacctggctatcttgcgatattgcatggattctcgaggaactaacccccgaagaaacaatcactttggaaatgccgcaacagttgttgtgcaagcttcgaagatggtgtcgtaaggcgtggccagaagaccaacttcgacgcaatccgagcaactctaatgggtactacgaccatttacccctcctgcttttaaagtcaaaccaaccgagcacacttgcaaaaagtctggagagcagactctttggcctccttcgcgatctgaacctctcttttaatcgattgcataacgatgtttatcataatttacttgcccagagatgtgcttttcgaaggtttgctgctgctttcgaggacatactagaagacattgcggacaatgatctttccctggaaggaaccgagcttcaccacgaaatgggcttcttaagtctgaatggaacagcagactaatctctctcgcaagtcacgaacaagagatgttgatggtgccatctctcgttctagcctttgggtccttcgtttcagggctgatgcgcgcaacgcgcacatctttcagttcaatacatttcggccattgaatttgagctaggtcaaatagagattagcgtgtttcgagagagggttctggaagaaatccgtgtgcgtaagtggtgaacctgatttcgatccaacctggacatggaggcgtcacagaggtttcgcagtcgtgcgccatgagggcagcctaacaatgggaacgccaattggccacgacaggccgtgacgaggctctaaggtcatgtcaggaagtggatcattctatgtgtacatactcggatatatagttgttgtatactgcatatcgctttggcgaggggtcagtgtaaatgatacctactactacctggacatggaaagctcgtccacggctaccactaccttaatttctccgcaacatctcttccatcaaaatgaagatttggcggtctgacaaaaaggatctcctatagcctattgctatatgctgggccggttggatgttagccacaatggtgttgtcgagggcgaaaagcatatggctagacaatatggcggtcacaaccagaatccactatagttcaaaagcttagcagtgttcaggaggaaccagaccgatccaacgaaccttgaacccggtgatggttctccctccctccttctccacctcctcggaggagctgtcatgcttctcactgagttgagagatcgagctaggagtgtgagaatccgccagagcagactggagctcggattcgcctttcagaacttcagtcattgcaactgatcaggcgctattgtccagatctatcgaggctgctctgcaaagaaatggattgcgagtgatctgatgggtctgctttttggattttttgggcacggttcgaattttataagagcagcgtggagctttaacaaaagcgatgtatgtactgaaaccatgaccactagtattgctaacacactatgggatgaaactggaccctggaatttacaatctgggattgcgatgggataccgctcaaacaaatgaaccggacgcgacgggatcccgctggatagcgacagttctttacgaaactcaatacgaagcaacaatgggatgcccctgggatagtgcaccgtccatacctgaatcccacacgctatcccagcaggggttccatcgccatcttactcttggcgacaacgacggcttatcccacggatcagggttcggagggctaattaaatagcattcaggctattgcaagcgaagctaaatggactccgtgatgtgagagtcagaataaatataccgtttacactctttagtatttgtctcccccaccataactgtccctttgcattccgcccgtctacaatctcgttgaaaatatacatctgcggttgacaaaaaacacctaccatcattatgaccatccaccgcattaccttgttcaacatccctaaaccggagaatatcgacatcctcttggctgaatatcgtcaactagctcatgaagcaaccagggtatgccttgaccgcctatccacattgacaaggtgtatgctgtcattttctctgactgacaatggcaagcgctacgttcgtgattgaaatacagaattcagagccttatattctctccgttcaagctggtcgtactttgcccgatgcacgaaccaagggctatacgctagctgtgaagacaactttccgcaatctggatgacatgagcttttacgattcgacctgtgaggcacacaaacgcctgaagtcggtggcagcacctcttagagagggtgatgtgttcactgcgtatttcgaagatgaggtggcattggcttgagtgtctatttttaagctttgagaaaatattatcgaggagatgccgataccttagatgaattgcttcaggattgtagtctatattataaggctgagttaacagacaagactgactttgggtagtagcttcgattattgtcaacgtcagaagtctcgatatctggcaagagtatcatgtcttgtaatttatatgccggctcaattcaactggacttttagtgttaactaggtgctatgttatcttttgcaccgttatttcaatttccatgcatgtatttgtacaagaaaagagagagatacactgcgtggagattatcctgaaaagtgtcatatccaatgaaattttgcatcacaaggctgcaaaagcggcgcagtttgagaaatccagttctcttcaatgttctcattgctatacgcggctgggttttccgcgagtcgcgcagccaagtccgaagtggcatgccagaactcacctttatctggcaatgcaaattgcagatctgtcagagacagaagacttttcccagggctgaaactgggcgcgtcttctaggagcttggggtcatggattcgggactgccggcacactctgtacaacgacaaacaaaatcgtttgacctcttcaataccgagccatataaatacgtcgggatcaactccaggcttgaactgagttaatatcgaggatagaagaacattttccgctttagacaggtgcgcacaagagcgacgagaagctgagagggtatttcaggcagagcgtgcgttaatcgcaggtctaaatggtcatggtagagaagaagagaaaaaatgagatgcaacaatattccttgatatgttgccattggccagggactgggctcggacgagggcgtttcatcttgctgcaattgtgactcgtgatagtgatttgatatatcccatttttcctatcgcactctatatcaatatgagaaaaacagaggaaaggtaaaggtaagaatatataactgactctttgttcatagattgaggatgtgagtttgtgatggaggtcttttgcagtctgtcgcgcattgctttccccggtcgcccaaagtcccatcataatcactgattgcaaaagaaaagctggctcatgatcaggatcgaatgtagcagggtgtaaaaaaggccattttgggtgaaaattcttgaaataagcctcgacgtatggtacgtatggtacgattctacttgggcatttttcaatcgtttctgcacgctgaacagaacttggttctgccgcaggagagtagggataaccaggctctacagatgctactgagctcatgtggccatcagcgttctttgtttgtttcaattcacgtcgtgaattttgggtgtaggagcattgaattcctcgctggaaacaggtatcacagggtgtctgtccgttgcatcttgaccttcgcgagcggcagtagttgcaggcttggactgcacgggatgattgtaactccttatttctatggagcgtacggacatgctgacgcagcgtgtcattcctagcaaaaacgcgatcacaaaaagggcattcataagattgtgattggaagtggcttttggcatgtcgtgtaagatgttccttgcgtcgatagccaaggccacacccggggaaatgacattggaacgagggtggctgcggagtcatcggaactaattaggcgatggagacgacagagcgtgagggaatgaggtgagcaggatgggccgggaagatcttcctgcccaaacgtccgaaaatcgacaatggggtcgtccaggagtgagaactagcagccacgctgcaggtataagcgatatggaatgggatggcgacacgaggtgggacccccgatgggaggatgggataccgatgggataccgatgggataccgatgggagtagccctagatgggataggagggatggtgggatgatgggaggataggaggatgggaggatgggatagcggggcaaacctttgcacgtcaggattggcaacgtacaacatacaagggacgggactgaaggaaaaaatcccacttcttggtggatcttcccattccttcctccagaatcatccgaatcattcagtaacttcatctccaattcacatagtctctgattatttttttgcttttaggttttgtatccttctaggctgtcttttcttctcatccattataagcatacatcatcattccacacaagagcagccacatgctgaaatttccctcaatcacttgttctgagcccttcaacttctcttagcatcgctgcttctcggcacagagagctttctgactcgctctgtgtgctgcatggccaccccacccgcctcttcacttcctgttcctagtgcttcctcgagggaacggttttttccgaaaacaggtagtggatacgtcaggattttgagcttatgctgcaaaatatctccttctcatctggaacgacttcgaactcctttttcgtggctttccctttccatcacgcattccctttggtacgtatgctaaagccattgtcattcgagacagccagaaggcctccacattctggaatggttatctccagggatatcttgggaaccgcttgtttcaacgccccatgattggacagaagaacgctgaaacgagtgtatacggcgatgttagccttctctctcaagcaaaggagtttgcacacgagcatcaagttagcgtcaaagtggtgctccttgccggctgggctgtcaacttttcccgccatctgcagagcgatgatgtggccttttataccaaccttcgggattgcagctttgacacagaatatatcgttggtcctatggacgtgaccgctcctcttcgaattcaacctttggagaacgagtccacactcgaagctctctatagattggaaagcgaaaagagaactgtttctcaatcttcctatgtgggaggaagcgccatcagggagtacagccaaagccaagcctccctgacgtccatgttcactgttcgtgaatcagagatccccatgcacaaagttgaggccctcgatgttaccacagaaacaacactcaactggccaactggccaactctccctggtccatgactcgagttactcatcggcccgagccaagatcattttgcagcacttctgggaagtcctccagcagatcatctcgagtccatacgaccgattcaagagtttgagtctcacgtccgagcaagagaaaagctccctgttgagcttcaggtcttcccgtggaaacgtctcccctcaggtggggcataacctgattgagaaacaaactcgtgataatggagatgctccagctctacagtttcaacttagcgaattcatgagctttgctaagctgaatgctgctgcgaaccgtgtcgctcatcgtctcactgggttgatgtcgacagggaccatcgttccggttcacatggatgtatccgtccagttcgtgattgttctcctggctattctgaaggcgggaggtgcctatgtgattcttgatcacttccagccaccatctcgcaaagcatacattctcaacgatgtcaaagcaccattctacatgaaaaatgggggccctatcaaagggattgcagatgtgctggcttactcaattacggatctcatgcatggttccacccccgatgcggaaatcgatttgggcttatctctggaccctgagcagcctgcatatatcatttatacctcggggtctaccggtgttctcaagggcgtggtcttgagtcaccgcgcggcttccactgggatcctctgtgctccagatatatccaacaaccgcagcctgcttttctacaatcccatcttctcagcagcccagagaaccattctgtctactctagccaagggtggctgtctctgcctggcaagttgatcgacccttcaggggtctctgatgcgcttcatcaatgatatgaaagtcaacactcttggcattacatcctcaaccattgcgctgttagaacccgagaagatacccacgctgcagagaatcaacctcacgggtgaatcactagaccattccgttgttgcgcgctgggccagtcatgtggagctgaagaacaactacggtctcagtgaatgcacacagctcacctggggacgacgcatgttttcgggagaaaagctgtcgagtcaaaacgttggacagccattagacactacatctgcctatattatggaccccgatacctcgaacctaacaccattcctggttctaggagagctgtgtcttgaaggtccccagattgctagcggttatctgaatcgcaaagaagaaacggataaggcgtttgttgatagtcctttcactccggggcgcaactatatcggactggcgacatggcaattcgactggaagatggcactattgaaattgtcggccggattgacttccaaaccaagatcaacggtcagcgagtagagcctggtgagatctcggctcttcttcgtcagcaaagctcggttcgtgcagcagttgtagtggctgccactgttgagcaagaaaaggctctcgttgcttgcatttcgccgagtgatacatcactatcctggcctcgagttgtctccagcctccgaacagcgacattggctagtctcccatcctatatgacgcctgcatactggatgccattcgacgacctgccggtcaatagcaatggaaagacggatgtgctgcaacttaggaaccgaatccaagcgatgaagcgttccgatcttattggtgcctcgatggatacagaggaagttcaacgagaactctctaacatggaaaaagtgctccagctggcctgggctaaggttctttctcttccatctgaggttatcacaatcaatcagtcattcctggcgctgggaggtgactcactcaaggccttgcttgtcatttcggaattattgtcccacaactacctcgcagagcttggtgatatgcttcgcgcagactccttggctacagcagcgtcttccttgacatatcaagaaaatgcatccgcaaaccaggattcaccaacacctttcagcttgataccgggcgaaacggacgtggatcggacaacatttgaggacgcataccctgctacaccttcccaagaaggtatcatctcagcgcataacagtgcagggggatatgtgtatcatcgcgtgtttgacatcgaagggtacgacgtgtctcgacttcagcaagcgcttcagatggtgattaacaacaatgccatctatcgaactgggttcgtggcgcacggcacggggttcttgcagatggtccatcgacagtttgagctaccttgggacattgtcaatgatacagcttccatcgattcctatgtatcacaggttcggaagcaagagatggacatcgctcaacctcttgttcgtgcagccatcctgaatggtcacatcctcgtggtcatcatgcaccacgtgttgtttgatttctggtcatccaaagttctcgtccaagatgctgcagccatctataataatcagactgtggcttctcggttgtcattcaacattttcgtgcggcactatcagcagcaagtggatgagaaggcggcctcagatttctggtccgattacctccagaatacttctgctacacgtttgaccctattagagggactgctaatgttgtgatggcaatccaggtcaaccgccaacgacctatgattgatattaaaatgtgggtatgggattatgtcaatggcaagtcccacagatcccaccatattcaggtttcagaaagcgagacggatggagtcaacctgtccgggggtccactcgtcattcccttccatctcctattcctacgaaatcctcaagccccaagagaaaccaacgtggtaatcgatgaagaatcgttacagaagattgccgagtggggatgggatatgcaatttcagtaaggacttatgactgattttgaatgttaattcagtgtctcagccgcacatagatttcgttaaaagaagattggtgatggacgacagagagattcgtttcgaagagacaaccaccccttgccaaagctgattattatcgagcttgtaagattctttattggcttttgacctcggcgggaaattgtgacaggtgttccaggttccgggagagcatgttttgctgtagcatctatctgcctgacaagaaagacaagaaatctacagtcatcaaaccgtcctagtccgttgctcttaatggaagcttcgtccctcctaagcacttggtcttatgaatgatgcgacttcgatgatggtgagcattcgttgtgatgtgcaatcctcacgaggatgaagaaaaaataaatgtacttggcttttatccatgtttctgagtgtaaaattccctgtttctccatttatgtattccttaagccttgggacgttctgggatatccttttccttattagccccagggaagcgggaacctctatccttgaccttcttctccttcttctgtacaactggaggcgggtaggccttgagggtgatttcctgccattcgggtgaatctgcataggctttatgaataggtgccatgagacgggtcagagcctctgctgctgcaggctttagatcttggggagtcaactaggtgatgttagtaggtttccgggagcaagtaaaaatgttaacatacaacgtcgtttgtgtaatcctctttgagttgttggatgttagtgtagatgagaggttcgttatcccggcgtgccacgcggaattccttcttgccagcgagggcggctgcggggagcaagacgaattccaccatggcaattatgccattgttctcgacgactcgagggaccgcttccgatttacggatcttcttggcgactatctcaggtgggtcgaggagatcaatcttgctatctacatggggttagttttgaaccttttagacgggttctttacataccttcgatactagagctcattttgcccccgctgaggcctgcaaccattggagtgataagatgggcacgctaggagttgaaaatcattagcgacattcattaagccttgccccatggacatatcctttacctttcggtatccgagtttgggtagccattctgttgctgcggtgaagagcttcctctgatccaggccttttttttggttagaaatagtgtagatatgcaagtaggattagacataccgcctaattcggcatcgaccttaagatactcctcatcgaggacctgaaggatcgggtagagcaggccgctcattggggcgttggtagattgcttcacaatctctgcaccagccttcctacaatcatgctcagaggtcatagcggcaagccggtagacatccataacatagtcggaactccgctggtaggaactcccaagcacgaactcgagcttctccgtcgacacgcccacagcctctaggactgctgtgatgatcttttcgtagtatttgacacggttttccaccagttcgagaggcgctttcattgaatctagaaacgcgtgcacgtccgcaaggagaatcaccacctcacatcctgacgctagtagctgggcgatcttgattgcggcgacgaaataaccggaatgaggccgaccagttgtagcagtgcctaaaaaaggacaagatatgtcagttcgccatattgaatggtagaaggtagggagtcattaccccagtacacacggggattgcgcccctcggcaaggatgctctcgatcagttccgggttaagaatctcgccgagattgtcccgaatgagatcaaatctttcctccgcagataaagccattgttagacagattgaagaatgggcaatactaataatgtaaggggaacagataaagaaaaagtcggtccaaaatcaccccgcaataaaatctgcagaataaggcggtcacacggggtgagtcaccatcacgtgactacgtaacatctgtacctgacccgatcaataactataggggattggtgaggctcttcaatacgaatatagtcaagttctattatctagctggtttatcttctgtcacacatttcattccctcttgacattttatctgcatacgtgcctcaataaatacagagaagagatttaattggtatctgcttgaaagtagtgaatatggctaatgtacagtctatggaattgggacttcttcaacgatcacgatcaagcctttgatatctaggtggccaaatttttacatcaaccacttcattcggcgccccacggtagaatctagggtaagggtagcctcgagtcgcgcccaaaccacagccaatgtcgccacaaccagcaatacaccgaccataatgctagtattctcgtagcttcgcggaccgacactcttctcgtggtttccgcggatcagtgcacccgcaactggggttccaactaatgtcgctaatcctcgcaccatatacagcaaaccattgacactgacaaagttctgtacaccgaacaactctactaggctcgtcgggaaaagagcgacgtatgctgaagcaaaaacgccatagaagatcgtgaatgcaatgaacagtgtgctcccggtagattgtgtggcggatagacacgagggaagccataatgcgaggacagacactgctgagatgagggttgttaataccaatgtgttgagtcttcccatacgatcagctgcatggccgatgacgatcttgcctagcgcatttgcagcattagagatggcaatgaagtttgcagacgttgcctgtgagtagcctagtgtacgagcaaaagaagcgaaaaagaacaccggcgtgtagtatgcagcggactgcaatgctgcacccagagcatgggcaacaaatttgcggctttggacgacgcgccagtccaccaacggaaggcggaaaaatgtagaagaccgggaagaagcggcgttctcggcttgaatacgggtgatctgactagcaggccagcgtataaaggtccctgatccgcaaatgagtgcgaaggagatccccgccgtgacgcgaagtgtattgcggaatccgagagactcaatgaggtatcgaaaggcgaggggccaggcaacaccgccgatcccggttcccgcgaggattatgcccatggctagtccacggtgcaatgtgaaccaggtcggtgccacggttacagatggcatgtaagttagacacgtggccataccaagcagaatgccttgggtgaggatgaattgccacaggtgttgactgaagcttgcaaacaacagagcgcttgaatgaattattccgctagcccagatgacatatcgaggggggtattgctttgtccaagctgttgcgaatggcgcacctattgtcatcagtgcgattgagagagtaccgataaggtcaatctgcgccggtgttgcgccggtgaacggggtgtttggctccttcgacatggagtcgtaaagctcttgaaagacaccgaatgcgaagttaattccgcatcctgtaaagacaagtgttgtcgaggcgattatgatgatggtggagtgtctgtagctgtgttagtccacctcttatggaggtggctgcggtacgtacagacgagttggtgagtttgccgggttttctccgtcaaccagcatgggtgttaaagaacgttccatccttggtagtagtataggtcgaatttttgatggcaacgggggtggacccgcgttgaaattgtaagagtgaagatgtatatgaggggtgacacgtaaggatgcacaaatgaagtaaaagagaaaaaagatgcatgtcttttgaaaaagaagttgattgttcttggcgtttaagcttatattaactgtgaacccggtttaaccctaacattctgagtcatcgcggggtatggccgaggctgtcggatttaatatggagagcactactgctgccatgaagataaacataactgtggcgacaggaagtgcagcagaagggtaaaaagacagtaatgtccgagtgaattcccattgaactggaaagcctgaaaatccggctcgggctatgatttagttcctgtttaggggtaaagaatggtacgtaatcgccgttagattcttaacaatatttatatagatcaacatcttaagccatttcatcctttaggaaattaccgcgttatcctttatgatgatagcaatgcgtcgcaatgagggcgaagcttccgtcaagaacagagcaacggactaggacggtttgctgactgtagattcgctgtcggacagattggaggcaacataaattcgtgtgtctaataaaagagtgtgttggctcttacatatggtctgttgtcgtattataaccgcattgaatcgtcccggcgtaatgaagccggtcgacatcctgggtagctgggcgagccatggctggaaaatagcaaaaaggatacataaataatccgcctaaagctgcgatggaaagctatggcaatgtcgttcgaattgcccaaaatgatagacagagaggatgcatttaccctattttacgataccatagcggcatcagacttggtagttcgagcaacatgattaaaaatgtcagatgagcgtatcaatccaattacgggttcgtagacaattgctcaatctttggctccatattcgcaatccaatatgtttttggtagaagacggtttcggaatttggaaatgccggcacactgtgctggacgacaagaggcggtagtgactttgtttcttcgtatcatgaagacaggagaagagagaaaggagtaagagaaaaggagaagggggggttaaaataaggaaagagaggtcagatgacattaaagaaatgaggaaagagcagaggtctatacggcaggccctctggatacaaacagaacagtcatcagtccctaaaatttgggcatttgccccatttatcatggggttgaggtgttagatgaagaggaagtaagtgcaatactgtataaacatccatgaccttcagtctctttcttcttttttcaaccacctgcctctcacctctgacttcttcatacaatctcataccgttctctcctttttcactgaacttcaccgtgatgtcgatctctgagagagaatgccaatgctgcgatggcaatcaaagtcaaccgccaatggcccacgattagtattgaaatgtgggtatgggattgtaaatggcatatcccacagatcccaccatattcaggtttcagaaagtgagaccgatgaagtcaaactgtccgggggtccacttgccatttccttccatgcgatttcagtagggactcacgactgattttgaacgttaatttgacgatttataacgatttgcatgctatttcatcacatgctcaagatcatttagttgctttgtttcctttattctacagtgctattttagatacgaatagtacttactttatactatatagagcaattattattatttcaaggatgctcttgtggggtgccaggtctatcagaagagaaagagggcatctcagcgaaataatcaagatggagagaaaaaggaagcaagtgtaagagtgatgcagccttgttatatagctgctaaccactttgcaaacgttgcagacctcgaacgtctcaatctatgaagaaagcatgcaaacagcatgagaatcatcgcgagtcaggtctaaagcaagtatactactggttcatactctctcattggatactaccttacctttatcaccaccttcatgagctatgtactaacttcttttatttggacaataagacgaccaggcattgatcttcgactatatgggtctttggtgtcttttatactggtttttgtactacttgttatatggttttcaaatcgaatatgataggcaagttatatgcagccctaaatgtatacaacttacgaggtacattccatggaaccttccaaccctggttccagggttccaatgcgagggtggatgactaagattatgcccggcaataatgtccaataggagagttatgcaccggttaatcgcccggaggttatcattcggcgagggctcccgatttaccccgcatattgtctgataagagataagcactatgttccgaggtccacatgtctcctgtctaatgttctcttgactttcaccagactcttctggtatttacctgctctttccatgacccccgatcgagaactaaatcagggtactaagcgtaagcgcggggagcggagacgcgccttcttggcgtaagtacattgctgctcggcatcatttcgcttctcacattgacaatcctcaaaaagttgcgagacatgtagaaaacaaaaggagaaatgtgagggcggtccaccctgctggagatgtcagcgactagggcgaccgtgccatttccaaggccagccgacccagatagcgacatccccctgctcctcaaccgtccccgtcgcgtccattccgaaagaccagagtcggcgaatacaaagcctggaggatatcgcccgtcattttcttggggatttgcctttagatgaggagaatatcgtccgtatcgcggacaaattacgaaactcgacgaacaccgtcctgccggaaactgccctggatatcaacgagtcatttgacgttcagttcgtgtcagataatatggcacattactcgggggagttttctcactggaatttttcccagacattacgccgcaaaatgagctgccaaatagatcagtttgatttgagggtttgtatctctccccgcaaggactgaagcgtgtctaatgacgtacaaaaggttaaagaatactggcggccaacccagcttcaatccccaccagaagtgatagtggagacattgacacatttaccaccaagagctattgccgacttcctcatcaccatgtttttcaaatatgttgaggtcaactccttttacatggaacggaaatggattgaagagaaggtagcgctctgttacagtccgaaaactacatatacggccattgatttcccttgggtatgctctgtttttgttgttatggccattgggactcaggtagcccacatggaggatgaaaaaccaaatcccgcttcggagatcacggaagaactgaacttgtgctctgaagactctgtcgggctagtcttttatcatgcggcatgcaagctcattcctgatgttcttttggttgcttctcacgaaagtgtgcaggttttcttgcttctcgccacatattcattacctgtttcgacgggtggccttgcatatacctattacggtcttgcaatgaagatggcgattcaaaatgggatgcatcgcaaatatcatggtggtaactgcgactccagaactattgaagtcagaaatcggttattttggacagcatacactattgaaaagtacgatattcaagagggcatttcacatcaaagctaatcaatgcttatagatatatcagtatcctccatggacgccctctgtcgattgcacgatcggaaataaacgcggatatgccaagagactgtcccacctttgagtcaccacgatttgccaatctaaccgcgttccatacattgatttcatacttgggagaggtctccgagacactgtaagtggctcaaaatgtgaaaccagttcatcggtgacatgctgatacctcaatagtgcacaatttaaaagatgtccgaaaaggcttctctctgaatatttagagcgactcgtacggctaaggaccagtatcaagcaatggtgggactcacttccagccactgaagaatgtcgggatctatgctcgcaaggcccgaatttccgacaaaactcgcatctccgactgtgttatctgcttatatatgtgtacatgggccgtgcattcatattcgttgatgacaggaaacaagcagatgaagctataattggtccagatcaagattcaggacgggcgcatcggttagttttggtggacgactgcgtgtcgagtgctttggacattcttaacactctgcaatccttatccgaccatgttggtctttgccgcgcttcttacaatgaattcggtgcttgtcgtgcggctattctggtcattcttgcagaatgtctcaacgcaggaaagtgccagagacttcaagatggcctacaccgtggaatgagtctcatacgtcagatggtcggaggaagctcttcgaaatccgacatctcatatctcgaatctatcgaagcagctatcagccggctagaagccatccctgaagaaggatccatttcccatccacaaagcgatgaaagctctatctctgcctattcgaagttcaaagactggacgcagtcactgaagaaggacaaatctgcaggtggaaatttggagctgtcttcttttagcccgctgtcgcatctcacacctagcacagaacttttcgcggacccggagctgaatgatatgacagctttctttgagcctcattggtctaatggggatttccagtttgatgcgtataatctttcatctctgtcaaattgattttatatggaggcaataaaactaagattctatgttactgcttcccttatccaaacaccgcatactgagcacgttttctccaagtcttctgcatgtcattctctggattccgctccgcatcttcggtcgcaatagcattgataaggtcttgttcatcgaaggctctggcagggccgaaatccatgtcaaccggcttgactatcttcgttttgaaataccactgtcaaagtcagacatcttccatcgtcaaccaatttttaagctctcaccttgtatacgaagtaatcaaagacgaacaacggagccgcgagataagaagagaagaagctcttcaccgaacccttttctccaaatggccagcaagccaggtagaattcacaaccgaagacaaacgccacaataaggagactaaagtattgcgcccatggagtgagaagacctttgaacggaagtgcgctgagatccttgttttgcgctcgaagtccttgccggaagcgaagatgagcaatataaatcgagccccattggaaaagcgtcgctatagccacctaaattcaagttgtcagcaacttcacatattaccccttttgccgatgtacttaccaaggccgaaaaccaactatacaccaaagtgcccacactgttgcagttgagatagcctagcccaccaccaaggcccaaactgatcaacagggacacatagggtcgaccctgcgagtcctttcttccgaagaatggatgaatgatctgcaggtcagctagtgctgtcaaacttcgacttgcgatgtaaacactagtaatgccacagctaatgacactaaggaagatgaacccgttgatggcgtgtgcgagaccgtaaacatccgcccgcttgactgcaatgacaaaggggcttcccatagtcccgctggcgttaacaagatccacatcattggagggaacacacattccgacgagccagatgttaaccacgaagaaggtaaacattctccagaaaacgggtcgaactgtctttttgatagtgcgacggggatcggctacctcgccggctataacagcgatgtgctcgcctagcttgagttagtatattttcctcaattcgagctcggatctcataccgccgccgaaactgaaggccgcctgcacgaaagccttggaaatgccctttattccattattgaaagcaccggggttcttccagtatcggaactcgattggtccgtttgttgctgctattccgcccgatgtcatgatgaacatgaagaatatcatcaagataactgcaatacacttcacaaaggacatgtaatattcgatgtagccgtagactcggacgtggaacatgtttgcgatggcaaagactaccagaaatatagtgataaatcccgcgagtggcacaacgtctgtctgtggccagtatttcaggacggatatcgctgctgttatctctgctgggatgatcatcacccacttcatccgcgttagtacatacgaccttgatgttctagtaggctgacataccgcaaaccagaagttgacaccaatcgcaaagccgaatgcggggtccacatattcagcgcattgtcggataaagccaccatgaataggcttgtatgtagtcatctcgccgattgaagagtattgggcgtacacgatcatcctgcagaccgtgttagttacaagagtacaagagcagatttctctggagtaccctacgctgtgatcgtataggtgattgctataccggcagggccggctatttattgtcaatatacatcttgaagggaatatcggggtttcaatgctcaccatagtgcaatgcttgtccagttcccacccatagaccagtgccgataccagctccaaaggtcatcatcatgatctggcgcctcgtcaaggaacggtggtacccagcatcgtccgacgcagataggacgagagtattgccatgatgctcagttcctgagctggctgagcgttcgatgtcatttgtctcgtttgtcttgagctcaattgcgtccttcgaggtttgcattgaagattggttcatgctggtgcctgcgtgagtcgtagatgtgttttcagcaacgagaaacctaccatctgtcaatttatctgagatttctagggttagttcccgaggtcaactgtatccttatcgctatctctggtatctctttaaagtgtttacattcccggcgggagcaatttcgcacttcccgccggcactgcactgctagtgtctttagggctacggagtacatgtacatacgcgagtaataaccggacctttacctgtaattaccagtatgaggaggataatttgaattacgtacagttcaagcctcgaatcaaagcatgctatagatataagataggcttaactattcaatatcatcagatctagtgttttggattcctggaaaaagtatcccctttggattgcctcatcgatctgtcagttgcattgaattatgttcccaccttgtgcaattggaatctgatacgatggaacacaatcggaaattgagagtacaatgcctctttaaattcgtcgtctcgatcatgataatgataaaggttatacaccgcaatatcatatcactggggtgtcatacgtagaccagcttcatcgacagaacactcgtgaaagaaattgctgagacggttatagtaacggcctatgtactctttaggctcttgtgtagtaagcttgtagccgttggcccatgatgtagtttttagggtcggaggtatcaagaagagcctccagcagaacctgactgactcaatcaggggtgtcgcagagatcaaacgagctccccaggatgacaatggcagtctgtgtccgcaagaagatatacagcactaagcccgggagacagatccttgaataaactacaggggttgtcatctgattgacgcttgcagtgtgaaaggatgagtgagatgtagctgaatccatgtatcctcaaaggataaacacaatgctatatacacactgattgaatgacttccctagtgaaatttgatatatatctggatagtactggccaccaaaatctgggaatatataataatacaaccatcttattcgtaatgaactagtaattgtatgctaattaccaacagtttctaactaccagatactactaccaaagtacaatctacatctgtacatcgacaacctcacaatccgaccgcgtaaccggtgcggggtattatatgattcatagtttcataagtccgagataagttcaacaagggtgactcgctactatttatccaatctacgcccctgcctttctttatctgcttgaaagatcatttcgcttcaaaaaggtgctggggataacgattgatactccaaatccccaacaaacgactccaacattgagacccaaccatgtcctcatctaagcacgttgtcttcgacatcgttggtactcttgtctcatacgataatgttttcgacgccattgatacccgattgggagaccgattgcgcgcagagggaatcaagccccgtctgctgggatttacctggatggaagcagccgagcgcgaatacaccaatctaagtcttgcccaaagctacgtccccttcggtcaagtcttccgcaccctattctatcgtatgctctggatggctggcattgctgagccacggacctgggcttcccccgaagatctggagtatataatggcggaataccaacttctcaagttccgtccaggtgcggcagagtgtgttcagaagctgcgtgatgcaggctttaccgtgtgggcttttaccgcagctgatatcaagcgtgttgggggctatttcaagaacgcgggcgttgagctgcctgcggagaacttgctctcttgtgatgacgtcggtgtgggtaagcctgacttggcggcttatcgtcctttgctggagaagctgaagtcggagaatgatgggaagacgccttggtttgcggcggcgcatatgtgggatgtctctgcggcgaggaaggctgggtatgtgtctcgtctttgagttagaagttgctactggttattactgacactttattatacagatttaagggggcttactgctctgtatgggagaaggagtctctgtcagaactttttggagaaatggatgttttggacgagactttgccagggatggcagagaagatcattgcccaccaggcgtcatcttgaaggcttgcacttagtcttaattacatcaacctgaatagaatgcccttttgttaaacatatttgtcccgcgtatatttagaagttagaagtattaagccattataaaaagaagtatatagctacagtaaacattttccaacctcaactctcaacaaggttgattttaagttcacacttctcttttttatctcccactctaaactcgaatcattcaagtcaactcctcaaagtattattagataccgccggacaaagcgttatcactgtacgtccgatgttaagtagccgggtcaggaccgggaaagttaccggtggaaaagccgccgggagggaaacacctccccagtcctcaatgccaatgccaataaataattccgattcatttgtgtttcctagcctacttccaagcccgctaatagccttggactctccaaaatggaatcgaagcataccccagtcccaaatgggatgacgtcattctggcggacagagcctcactttctggacagccatcgatcaaccgaatctctccctcgggagtgtgatatcgtcgttgtaggagctggatatgcaggagcatctgttgtgcaccatattctcgaccaacttagccccgggtcgacgccgccttcgattgtgattctggaggctcgacaggcttgttccggtgccactggtcgaaatggtaagattggatagctaagagtgataaactttgctaaaatatttctgttctgcttattgtaggaggacacatgaagccggatgtttataatggtatcgctagcttggccgttgatcatggtgtcgaggctgctgctgaggttgccgctttcgaggctaagcatgtctcgtttctcaaggagttcgtcgaaagagaaaagatagactgtgaatacaccgtcacaaaggctatcgatgttcagttgtctcggagctatagcgcaacactcaagaaggcatacgatggattgatcgagaaggggtgtgaagcgaccacgaaggcaaaatatatccccagaaacgaggccgagaaggtgagcacattttcgaaatgtcatatttcgatatactgaccagctatccatcagttctctggagtcaaaggggcacaaggttgtttcacatatgacgccggtcacatttggccatacaaattcgtgctgcaccttctggaaaaagcaattgcggaaggtgtaaatttacagacgcacacacctgtatctggaattataaagtctactccctcaacatccagccatccttggacagtgaatactgcccgaggttctgttgccgccaagacagtggttctagcaacgaatgcctatacttcgtctctagccccgcaatataaggagaagattatccctgtccgaggaacatgcagccgaattgtcgtgcctcgaggttctaccgctcctcctctgacgaatacttacaccctgcgctggaacaattggaattacgactacctcatcccacgcgccgatgggagtatagtcgttggcggtgctcgcccggctttcatcgatgatctagacagctggtacaatgtcagtgatgacagcctggttcttgagcctgctgtccgatactgggataattatatgcagcggaactttgtcggttgggaaaatagccacgcttacacggacagggtctggacaggaagtacgttgctcaatctatgatttccctgcgtgtaccactgaactgactcaacttctctatagtcatgggctattcgtcggatggattaccgcatattggccttgtcccaggacagaaggatcagtacattatcgctgggttcacgggacatggaatgcctcaaattttcctggcggccgagggcttggcaaaaatggtactcaatgatatcgattttgcaaagactggactcccgcggctatttgagtctactcagtcccggcttgatagtcgccagaacaagatattcgatagcacccccggggctgggaaaccccaagcaagactgtgagcaggattcaaattttagatgcaccactactagcgatttaatgaggtacatatacacatgtctttgtattgcatgttagcataataaatagtggtggatttttattttttattccgtatagaaccttccaggtttaaataccagctacctgtaagcgaccactcggggtggtgacgcatacgggttatagtttgctgggagtagacgaaccaaagcctgtcctaatgtgacctaccgtagggggtagcctaggttctatactctatacaagcctttaggcattcgaacctacccagcttagtggctacgccgccgnnnnnnnnnnnnnnnnnnnnnnnnnnnnnnnnnnnnnnnnnnnnnnnnnnnnnnnnnnnnnnnnnnnnnnnnnnnnnnnnnnnnnnnnnnnnnnnnnnnnnnnnnnnnnnnnnnnnnnnnnnnnnnnnnnnnnagccttccgcccccccccccccccctcccccgggggggggtaggcggtaggggtagacttatttgcttatttacttacttgcttaaatgacctacagccggcttagtagctacgccgtggtttacttatttacttacttacttacttgctttcttaaatggcctatagccggcttagcggctacgccgcggtttaattatttaattatttaattggttgattgtttgcttggttaaagggtggctacgcaatcgccgccggtatatattacgtaatcatactatacagtcacgtgccagatgcataatgcatatatatcacgtgattagccctaccctagtcacgttactaccgaatttttgaccaatcagaagccatacatgagaatctgagattacgtaaatcgaagtaactaacgtaattcacatacgagccgccaccacatacgacccgccaccccattcaacaatnnnnnnnnnnnnnnnnnnnnnnnnnnnnnnnnnnnnnnnnnnnnnnnnnnnnnnnnnnnnnnnnnnnnnnnnnnnnnnnnnnnnnnnnnnnnnnnnnnnnnnnnnnnnnnnnnnnnnnnnnnnnnnnnnnnnnnnnnnnnnnnnnnnnnnnnnnnnnnnnnnnnnnnnnnnnnnnnnnnnnnnnnnnnnnnnnnnnnnnnnnnnnnnnnnnnnnnnnnnnnnnnnnnnnnnnnnnnnnnnnnnnnnnnnnnnnnnnnnnnnnnnnnnnnnnnnnnnnnnnnnnnnnnnnnnnnnnnnnnnnnnnnnnnnnnnnnnnnnnnnnnnnnnnnnnnnnnnnnnnnnnnnnnnnnnnnnnnnnnnnnnnnnnnnnnnnnnnnnnnnnnnnnnnnnnnnnnnnnnnnnnnnnnnnnnnnnnnnnnnnnnnnnnnnnnnnnnnnnnnnnnnnnnnnnnnnnnnnnnnnnnnnnnnnnnnnnnnnnnnnnnnnnnnnnnnnnnnnnnnnnnnnnnnnnnnnnnnnnnnnnnnnnnnnttcctactatatataataaagtcgatagtataaagagtttctaaagctagcgaagtctaattttatcagaagtccaactgtttagactaatttcaaaacgccaattatttagaaggccgttaaaccaagatttaataaagactttacctttaaaaatcatatatagaagaagcgcctaccctactgtatttatatattcaattacagtcacctactcgcgatttctaggttataaaagtaatctctaactataatattcacttctagttataacctttgctattacggttaatcctatagtaaaacctatcttattgaagttataaatatcgtccggatcgattctatactaaagaatggttttttgaactagatcaaaccactctctaataatccttaggtctttacatttcgcgcgctcgtaattataacgtcttaagaatcgggatataagggtagggtgctgtttaacaaaatgtataacctaattttggctaactgaaataaccggggtagttccgcgttgtttaagaagaagatccgccatttctcgtacgggttggtattcgaagataaatattcagttttgaaaggacccgatcaggtaaaaagggtactaaaccagctgctgagaagctgtttttaattatctctaatttaaaagctttaatttatacggtagggtatgcttcgagaaagtcgagtttattaatatagttaatcctgttctgtattttcgttttaattaaccgactatatatccgttttaagactataaaacagccgatattaagtagttgtaaaaggtaagaggaatacagtggtatacaaattggtataatatcgttttccttataaatttagtcgaattaaggggttaaatggcttctataaccattgagtactaaaagtcgataccttcctactatatataataaagtcgatagtataaagagtttctaaagctagnnnnnnnnnnnnnnnnnnnnnnnnnnnnnnnnnnnnnnnnnnnnnnnnnnnnnnnnnnnnnnnnnnnnnnnnnnnnnnnnnnnnnnnnnnnnnnnnnnnnnnnnnnnnnnnnnnnnnnnnnnnnnnnnnnnnnnnnnnnnnnnnnnnnnnnnnnnnnnnnnnnnnnnnnnnnnnnnnnnnnnnnnnnnnnnnaactaaatcaaaccactctccaataatccttgggtcttcacatttcgcgcgctcgtaattataacgtcttgagaatcgggatgcaagggtagggtgccgtttaacaaaatgtgtaacccaattttggccaactgaaataaccggggtggttccgcgttgtttaagaagaagatccgccatttctcgtaccatagagggccggggggccgatccacgagaatccatagagattatccattttcgaagagattcctcttcaattgcggtcaatttagtcaagttggcgcgagaagtcgcgcggtgttgtataccactgaggcggtcccgaagggttgaacgcggtacgttaaaagtgcgggcggtagtagaaatattggaaaattcttgattcttaaaagcctggatagctaataagatcctaccctctttctctattgaatctttagaggattgagagcgttttggtggcatggtgggtggttgaattaactaggtgctaattcatggacgcgtttttggatggggtggcgggtcgtatgtggtggcggctcgtatgtgaattacgttaactaagatgttggaaataaggtaatcaagtaccagcgtaccgatcaactcatccttcttgtgggtgctctaggatattttttatagcatacttttgacttaacattttaacgttcctcttcatgttatagaaaatatagtccagcgggattaggttagaacacctgccaacaaacggagtaaggactaagcaggataatgtttccctcgtttcaaacaccccatgggccttattctgccggctgggccattctgccaaatctcaccgtacagcttttcgccgccttgaaacctagggaccataagaaaaggcctatcacgtgatacgcacacgagcttcgctcccttttttacttgcgacacactccccgctaaactacttcgggtatatctcccgctggccgcagtttccaatcagctcgtgtaatttactatggtatccctagagtgattgtaaggtactgtcagccatgaagctatttagagattatctgatctatcgaacatgaagctattcggagatcacctcccttcgtaaagtttaatgatcgaaaaatacagcgcataacaaaaaccaaggttcctgtttaaggcctaggggggccatatcgcagtctgatattcaattcttaatgctcaaattctcattctctatactgaatctagcctagcagacaagatgagagcgatacaacaacccaaaggtcagctagagttacagactatggagatcatcctcgtatcctaatggaatgacattctgtaaaacccttgtcattctgtgtctcttgtcatccattctcctcgatcttctccgtctctcttctccgttgatttctctctgtggtatttattcattcttccttcattctttgttatgtctcaactggatgttttcctcaataggaaacacggtcaggatcttgccttatcctgcaaatcctcgcattgagagctgaccagttaaccaaatattgataatggccctccgaggtggctaaacaggactagatcaaatacagagggggcattaagagaaaagcgaaagcataaaaccaaccgacggagaaacagttcaactcagactatcaattcaaccctacgataaccgatcgccaatatctcagttttcaccttccatatgtgtatattttctcaagatgagaagatggagccgggcttacattgaccagcaatctcagggaatcagttcaaccctgggagggaagtactcgaacgattgccatggtatcgcctacatagcctttgtgaatctggatcgacgatatgagaggcttatacaatacttggagtgacttgagctttcaaatacacgcaattataacccatttccctctaacattagtgcatgcattctttatgtaacttccaagctcgttgttggaggagagtaggaacaagctgtaggccgaggcgaaaaaatgaactccagggctccttcctcgtcagggaacttttttctttatggctgaggtcacgttccaattcccattcattttactcttcccctcgactcctcttccctttcgactagatctaagcttctggaaccggtcatcactgtactcttgccactgtccaccgatcatcatcagtgcttcagttccatcgcatatgctgtttctctacttcttattggcttctgatcctctgacgaggttaggtctctttttcatctcacttctggccagcctgctgccgttcgaaatgagctcaaagctacctccccgccgcactagggcggagcacaatggtaagctattatttccacagccccccgtgtaactgacatgagctgacttgagataaatcacacagccgaagagtggtgggcactgcttgagattcccaaaaccgaaaaggaatgggaagacgcagcctcaaatccatacattcccccgacgagcgctaagagcgaaacagaaaagtcaaagggcaaagagccagccaaaacgacagataagccacaaaaggcacccgatccgcgccatgggaagaggattagggacctacatgtccgagaaatgaaaggctgtctatccgcatctaagattggcctcccagaatacctgactggacgtatcttatggcataaagccgaaatcagcgacctcttcatcgacgagaaccagactcagacattgacagatgttcaaaaagggttgggattcgagaaggaagccagacagtttgctgcaaagtaccaagcgaagaatacagaattcaagaagtactataagcatattaagaagtatggcggttctctccgtaatgatgaacgccgttgtaccggtgagtacgccctcgtccgtgaccttcaactcaatatcattcaacggcccgacatcgaagatcaacacttgcgagagctttccgaaaaagctaggatctgcgagatgtgggcgaggtcgcaatgcaaaaggaaagtcgatttttcttgagaccacaatccgagcaaggtgacatggacatggaccggaatgatcaggagtctgatagacctgccaagaagcagaagaaatcagatgaagatggtagattgattctctacgcggatggacaattagtcaaccctcagaacaggaatgacatccattgtattgtggaggtcaagcccaatctcttccggtccaaagatggctatgaaaaggtcctgcgccagatgggctgggagatgctgttttggattgcgaattgtcacaagctgaacctcatgaaaaaaccggtaagccgaaattccgcggcagctaatgcagaacgctaatcaaagatacagatggatcatgatggctgaatgtgctgatgaggtttacctggtcatcgccaggtttgaacagccgtggcttgactatatttccggagaagatccagaggacaatcagcctggtgacagctttctgcatctctatcttgcaggaccgctgagtgtgtacaaccacaaacatgtcaagctcttcggaaagtttgtggtcactttcaccatgcagcaactgttggatgcgtcacgttgatcaagttacttcggcgcagaacattgtacccggcaagctttctcctcggctttctcctgttttcttctggggtttgtgccaagaacctcgatttctttatgaccgcaggagatttcatcgcgctgtttgagggtgcagggggtccacggctcagcggtccacgcgctagttcaacatcggccagtttccagcgtctcgactccggtcagtcgatcgttcagcggagatcaaccctccccgcgaaccgccacttcagtgagatttcggtgattgtcgggaacgagtcatgctcttgctcgcttgacagtccgtccgaactctctatcggtattgtacgcatctgatgactggtggggggatagctagactccgtcgccactacatagttgccccggacaatttcattgctctaagcttcccgttagcatcaattcgcttatcccaagtaaattaattatgtctttaacacttacactttcatcgtcaaaaataaaggcagaatacgcggccgactattcttgtggtttcaatttaaaatggagcaaaggcatatatcgattatgcagaaagcagcaacgtctctctcctcctaatgtcaatttgaaccacccagaccaaacataataatatggagccatcattgtagcaacatcaatgttcaccgtgtcataccctggcccatcacagctcattgccctcattttccatgttttttgatataatgggcaatgtgagagtctgaacggtgttcatctgtgccagaggccatgcccaagcaaccaaatcgctcatcaattcgccataccatgaatcattaacccattcccgatccaaaagatcgccgtaattatatttatctgtcgtgcaccattcaaagtctacggactcggtgaaatggactttcagtccattatcgtagtacccagatagtacacgggcacgagtgtgatcatcgaacgtgacaattgttgtctggctttccttagtattgaaatatgcaatatcagagggaatactcacggggaaaagatggtgcaactggatgttctcgtcctgcgatgtaccgacacgtcttttttgggagttcattgctttcaacattcgagtggctagcactaatagctcggtaatggatggtcggttctcatcagactcgtcaatcaacgccacagcccattgatggcattgaagaggattgtttctgtttcctgtgcgaacaattttgaaatcgtgatggttctcccgggattcgaaatcatagggcattggataactataaagactgtcagtgagcgatatgatttcgtttttcaagcattcccactgactgataaacattccattcatataccatccgggcttcctcggcctcatcgatctttctttgcctctctgcgatctgtctccaccactcttcctgtcgtttgcgccgctgtacttcatgctcttcactctccttgtcactttcctcgtcactatcccactcactacacatatcttcctcgctctcctcagaactctcatcaaccccttgaacgctgctgcgctctttttcgtcattattttgctcgcgcatctcttcgtcagcctctgtacttttttcatcctcttggtctttaggtaagtatcggttgagccatttaattgctgtttggtagtataagaaggccgacatcaggtaataagatggtagaggccggcgggtggaccataatccccattcccatcgccggctcacaaagggctcttctcggattttctcttgagtaggatctggaacatgttctgctccattaggtgcaaagtaaggagactcagaacctgtcttcagatccatttcagcgactgagatacctagatgctccatagtttcgtcagtaatggaagcaccttccatcttccgtagagccgcatggatgtctttcatatggtcatagctgtgattgaaacgccgaagcagtacttcagaaatagagaggtccatcattttcaatgagaattcaagatggtgtatcgttcaatcaagtagattggaagagaataagttaagggaagagagcaaaagaagactttatgtgcgaagggaatagtcgacgtgacgtcagaaagcataatggacacttgctcaaattggtttagtactatcgaattgtaccattggtcatgagaatataaaatgggttggtccgttctcgaaaatggcgccggagctcaagtgactagtactactggcccggacggttagttaactagcgaattccagacgaagcggtcatgtgataactataaaagcacccctggtgcacaaatccaattaccttcctttctactagtagtcatcccaagtgttgtcctctctagcaccctactattcccagtgaacaactttactttcaccctgtttcacaggcagggcggactgtcggcacccctgctgcctccgttgtagagttccctcttcactagctatatattgaaggtacaggtgagatagcgtggtatatagacaattttatcgtagctacaccaactaaagcgatgctatacctaagcctaagccttaaataggtaccttggtttttgttatggactggtggtaaaatgcgctctatattttccatcaaaccttccagatttcttagaaacatagtagttttccataccaatgaaatgaactgcttcactcagccagtgaagtgagagatctgtgcaatctaaggaaagcattatgtttcgtattaatctcgaaggccatggcatggctaatgaatagagtgatgttgaagatacgctgcttatgatgtttcagcagctgtgcttgtaatacctggcataccagatcggcagacaacattcctttatagttacatctgtagacagctttaggtttccagagacacaatgactgttcttctttttacagtgagatctttcacatatagggaacgagaactcagattatagccatcatctgacagtagaacaaaacatgtcaaacttcaaccctaaaaataaaagtaacagcagtctagctttcattttccgcagttacaattctgaagatttcatttgcgacatgtgggccaagaatgtcaagcgagccaatgctcatcatctccagcatcggcatatcaaaagagaatacttgcttaattaaagcgcgtagctcgagagatggccatggcgtcaatgacatcctgttccagaacaggcttgaagccactgcgctatatctcgcccatcataccctggtgctccgaaatacagccaacgtcttcgacggctcccatatcaaggattgcatcgtcgccagcgagaggaacacgccttgcttgatatccgagagacgcagacagctgcgaggtaacgacttcgaaaaagaggctctcagctgggtggttgtaggctgatccataagcgaagggaaagtagagttcgtacttcgagtaggtgtgttctgtggataggacatcggctaccacttataagatcaattgtagtcggggtagggggaattggtcttgctgaagcaccatcttttatggtccgagaaggacccaatgaagccatggaaaaatcaacaattctcaatattctgggccgagctgcaccgaaaatccgaatactagttaggaatagagcggaagtacgacgtatggagtggtaaatggaatagtattgtagataatctagaagtgaaacccccactacgaagcgtccttttggggggatttgatgcctggatgccttatcttagagcggcagaaattttaaatacctgaattaccataacagtagaaaatggccttatttctcggcatttgaagccgtctaccaacgcttaatctggccgccgctcgaagtatccctcgaggtaattcacacacccttacattcctattccgtcgctgaccctgttgttgtcgcagccgcaaaactaaagccagtccgtcgcaagcgtgctagatctctagctatgtactactcctgcacctcagcggagacggaggatttgatcccctctacctacctccctcccccggttttatgccgaggaagaaagaaggaagaagagaggagaaggagagaaaaccaacattaggggcttttatatatcaattcaagtagaactttttttggaactcaaaaaccacccagaaacatagagatggcgaaatttgtatgggcccaaaggcttcatctttttaaacttggaattaaattttacaatacattggaaagggcggtgtcgaaagcggtgctaaaataaggcaaccaggcaccaaatccccccaaaaaatgagttttgaaccctgagcgctatcggtcttcgtacccccactgcattagttataaaagcaccccagaggcggagatagcaacgcagacggtccgtacggagtagctagattatggaccatcattatcctccccaggacttctacagatactttgcgtaggattagaagttagaatcagtcgtttcgctctgcaacgactatctcgacggcctcagtattagacttctggcctagtgtgtatatttggaaaaggtgaatgtggctgtattgatgggtaacagcttcaagtaacagctacgatgttctcacaaacatagaatcacagagaaaggagttgtttattcgctagggaaagaagcagcatctcagtccttcatctcttcgtcctcaagttccagccgagccatttcctcaccctcaaattccaaccggatcatttcctcctcgtcccgggccaccgctgctctggcttccgccgccattactctgctttctgctgcctccatctctgcccgatgacgccgcattctggctgctaacagttgccgtcgtgctactctgctacccgggtttcgatacaactctgtgtgtgctgctgtcgcaggaggagttctagaacgaattggtggctgagtaagagtcggtggggaacgggatctggaccgagcagctggcggaggaagttgaacccgcgactgcaagtctgggaatggatttagtggagtcgataccacgctctgagcaaacgtccgaatggaagggtcatggccaagagaaccagagacactatcaacgtccatcatgttcgaaatcgaggtggcattgctggaagttgcagggcccgcttgttgctgagagtgaacaatgtgccgattgcccttggctgttagaagtcggagagtgccggcaaagaacttgttatgcttcgatcttctctcaatgttctgaatgacattctcaggccagaggcgcgcgtttcctacaacgacgatagctttctgagcccggctcaaagcgacattgagtctatgctggtcggcaatgaagcggacctcctcagcaacttcgctaggcttcgtcagcaggacaaccacgatgggcgcctcttggccctgcgccgcgtcgacagtcaaattatcgcgatataaacagccgcgctcggtctccgccaaagtggcggctacaaggttccgctgggctgtgtacgggctgatgatcatgacatcggacgggccaatttgctcgccttcggtggactggaaattgtacagattttccagcagagtctgcacggcttgtacctgcgccatgttcgaccacgatgtctcattcgccgggcggaaggcgacactgtccacggataggaacaagcgtcggctgccaggagcgacggtaggcatcgcatgcctggtccaagcatcccatgtccttcccactcgatccaagtggttgacgttgctgcctgaagcgagctttccactgtagattgccttgttgaacaactccaggatctgcggatgattccggtagttggtcacgagcgtctcctgggggtagcccgcttccatgagacgagacaggagggaccgcttcaggaactcggagccctcatttgcaccgtctgaaagaacagtcggaggcaactgccgggggtctccgatcagcacaatgacccgcattgattccattgtcattggaatcatactttctccctccatgctctgaccggcctcgtcagaaacattcacagatggtttgaagtctgaaaacttcaaacattcttgcgaggcatttgacagagttgttgctacgaccttgcttttagccaggaccgtacacacaatcttgccgtagaggctcttcagcttgatgacatcctggaggttgagtgggtggttatcactggtgtctcggtcacacagttcacgaagctcaacacactcaggatcattcggatgctcagcgatatggtcaaagaccagagagtgcatctggatcggttccatctcgagatccgactgacttatgatgggctgccgccgtagagtgggccgttgattctggctctcggctcggaccgccgacatgtggtatgatggcgtgcgaaagcgaacaacctgtccacaccaagatttcaggcgactatcccggttaagggcccggatcagagccagggtgaggttgtcaacgcctttgttagaggcagaagtgagtaacaccttgatctggagcgccatcatggcaagaactatggctaccgctgtggtcgtcttgcctgttccagggggaccatgaataaggcttacaccgaccgtgatggcggtagtagacttggtgaatgcctcttcttgtgttggatcgaggtggcagaagttccgaacatattggaggcgctctttggcaatttgggagggaagggaggagagcatctcgatggacaaaatgaagtagtcaggactggtaaagttaagctctgtgccatgtgcgaggatagtccgactaagtgagaatcccagtccatggttttcacccttgtcgccatatacgagcgttttggtacccgccgtagtcaatgccgcgatttgttgatcgattggaagggtatttggcttcgtggtcatcacaatctttcgctcactttcatcagtccagtcgaggtgaccatagtagtcaatgatgaaatcacctaacgtttcatcatcgacgactgtgcccttgtatcccttggccttgaaatcaccctcggtaacaggctcagctgctgatatctcgtctagcagtagaaagctgacggatgccattgctgtcagtgtcggaggccggccctcgcaattcaatttgacgtgaatgcggtgcctcataccgttgcctgatatggtagtgatgattgcgcggtgtcgagtgttcaggttgaacacactggttaccaaatcacgcgcaaaagccctctcaacgtagctggcttgaaccagtctgctctgccgatcgtggtcgttgaggaagtagggcccagggagttgccacacgatggaaggcttgactccgcttggatcctcaagccactttggcactactcgcggctcttgattggccggatgtttccggtagaaccagaaagcctgtgggggggcgagcgttgcgggatcaatgcttccatacggacgacgaagaaggctgttgagagtgacgggatcggtgtcgccaaatggcaggcgaagcaaatactccagcccagacattaacttccaccccttggaaaggaatctccaagctgggtcactccactgaccccagagaatcaagttgtcctggacaccaagaagcctttcccagtcctgaagagtagaagggctagcattctccggtgggaagccgatgacgactggcggcctgcgcatgtggactttgacaaggtatgccgtatcccaaactcgttttccatctgcgaagattcgcggcaaggaagctcgatactgacggaatgtttcagcatcgtccagttcaattccttcgcgggcaaagtggaagtcgcaatcctccgcggtaaagatcagaagcccgttgacacgtttgccaatgcaaatctcgagtctgggctgctgtgattctagcactaggcgggacttcacgttgacgaagctatccccgaatgagatcacgctaggcttccattgtcgcaactcgttatcaccctgggtatcgtgacccataggctggtcaaatcctcgtgcaaatgcgttgaaatccattgctggtgattgtcaagaccctatgagagtagactatgttagccagttgatcgtgagtaaacgagcgaggagcacggaaaacagactgacctcgtcagaggatcagtgaagaggagcgaggagaggagcacagaaaacagactgacctcgtcagaggatcagtgaagaggagcgaggagagcagcacagaaaatagactgcccttgtcagaggatcaatcagtagtggaaaaatagaggagatggaggaaaattctctgcaggcaaatggttctgggagaatgtggagggtgaagatgtgaggaagataatgttgggaaaatcactcttgggatgggggtatgactacctaccttctacacgtgtctaggcacgtgaatatctcagcaattcgttaatcgatggatagctatgaggtgctcccattaccaacagactcacctgcatcaaagtgaacagatggcatggccaacgaacggctcaccaagaatgaaacaacaagcgaagacgtttcacgatatctctctaatgcagttctaggtaccttgtggccacatttccggaaagttgacttgggagatactgttctggattgcgagttgtcacgagaaaaactccatgaaaagccggtaagcagtaatcaatggatactaattcatgatatagatggatcaactatggcataggattttcctcagtcggcccattcttgcacatggtacggagcttgataaccagtcctagccatttcgttctgtcaatcaagccactcccctcgattctctcccacgttgccaaacagcgcctccaatatgtccgggacttcgattcaaaccaacaagatgatgcatttacaaagttggtcaataaagcgattcacaacggtcggcacactccaagcagcgcgaactagagcgagtcggaaaaacatgggatacttggaccaggagtaaaacatggaggtcgaggtattttcccctgtccacatcggcacctggcgctggcagtgaggttcaatggtcatcagcctcggttcattgcaaacaaagagagactgaacttctctttgagtctcgtcattgttcgcagcatgcctttagcccgagcatgtgatcaagaatatcgagggaagattgaattgcatcaagcctaattgtgtcgttctccgattgatcgcggccaagggcaatcgccaaattgttcactctcagttgcaagcgcccccggcaacctcgagcatttcctcatatttctgagctgatggacgctatcctacagttaggacagtggggattcgaccaatgacccagaagtttcaacccgttcgttcagagaatggtattgagcccaccaactcgcacccggtcgtcaattcgatctaaaactcgtacgagaacagcacacgcggagttgtatcgaaatccgcatagcagagaagcagaacgtcaactgttagtagttagaatggagcagagacggaggcagctaaagccagatcagtggctgcccggtatgaggagaaaatcagctggaactagaggacatggatcttgcagccaggacaattctttttcgcgtgcgataccatgttaatgaaaagatcatgtcacttttcctctgtcgttgaagctgttaccaatcaatgcagttacgttggttttctcacactagaccagaagtagaagtgggccttccggcagcaattttatacccggcccttgccaagtgctcctcgctcaacttacaatcacaggttgtcccccaaaggtggcaatattagatgtagacgatagcgttctgtgatagatcacatgctatgaaatatgaaagaaatcagggaatgtttgttgaattttagcgtcgagttttattttgcccctagttattctatgtacataaacctttcaaaatatagcgagtgaccttagaaggtgactatgcttagtcgggtagacgcgtcaagcggtgacgttgctccagaagtggtccagccttaggactaagagaatatcagctaaccccgcatgactcgcctgaagtcgtcattaatttttatctttctagatagtggcgatttcagtcgatccttcttcggatctcctccgtagaacgataagtggcattcaagcatagaagctcggccatttgttggtcgatggaatcaacggactaccaggtgtttacaaaagctgtacaagcatgacaaaataggtcagacatgtaacactgatatgatatattcttttgtttgctgtggttttgaatgccttcgagtgtcttttaagtgtcttatttgagctcctttttgagtgccttagtttatgtctttctattcctatttcttggtatagcactttagtcagaaaagggcgaaatgataacgctgcccaggtgtgatattcccacaccgtacggtcaagactgacgagccgtgccgacaaagttaaatgagcccggtcttggcgtcttggcgtcttggcagatgagaatgacatgctcttattgtgcaactgtcgggtatacgatgtatcacacaagtactttgtgcgaatggccttgttaccttctataaactcgtacctagcacagcttcttactgtagataatgtgcaacttaatctcaccttctccgacgatcatataaatgccatcgccaatcacaatggcgtgcttcacgcaattccccacacaattgcgcgatatcccctcatttaaggtgagtagggagtagttatacctcgagctttaatatttatatcatgcacctcgcacaattagcttctaatcacttgcattctgcaacctggttcgcctccttatacgagctagatcgcgcctaaggattttcaccctgaaagctcgctatggaagctatcaatgcatcggacgagaagactatggagctctcaaaggatttagaccttgaggccaacacacgattagaatacgacccatggcttctcgacgaccatcccctacgatcgtacccgacagagtgcatcccaggcctgtcactttacctcgacgaatactacgagtccattggaaagcgaagggcgcttctttttcgcgcgggatgccttatcctcggatgcctgtgagtgtttctgtcccatctctgctagacagccaatctgacacattcctccccagagtcgcattccaatgtctccgatggctcccaatccatatcacacgcacgggcccacaccacgcgcaccttcacccccagagtggcgcgtgtacatttccgacgctagacacgcgaccgcaggccctcgagtcgtcgttcaacgagggatgcgatggcctccggacggcggtctggatgcacaacggggagctgcagattggagacgccggtgtggagactgagcacgagcacgtcctgcagagactcggtctcgaccctcttatggagaaagttgctgagaacgatgccaccgcccgggcatccgttgatcctgggatgtcaggcagctttcatcctggtcgggctcggactttctttttggtgcttgaggctaggacctcgcttgacgaattgtacccgcgtctcgttgagcaactcgatactctccggcagagggggtatttgtcccattgggatgggcagaatgttgttccgcgccatttgactgtggtggttacgggggaggcattctctgggagtgactgtgtgcatcattcttattctgacgtgttctggtctttaccgggaccgtttatgattactaaggatggcctccatctctcgccggtatgtgtatagtagcgtaaccgttgttgactgtgatacccaatttgagtttaatttgatgtgcatgatatcattatatcatttccaggattgattatgtgctttaactgtgtacacatctatatctccactgcaaacagcgcaagatcacagcacagaggtccactttagcatcttctcagatctggatctaattcgattagagtaaatacctcacggctctaaatgaagcataaatacgtgcatagaaatggaactcccctttatccatcggctttgctccgtccaggtcccacccagaagaacaataccggtggtccacgtggggcctttcatttcctcatcgggactagcgggctcttctatggaaaattacagttttctttttgtatttcgcgtcttcgtctcgctttttaaatatccccagtctatacgccgtgtagaatttcaaatctacttaaaaaggagaaaataagtcgcaaaatgataaaagtagtcgctatctgccttcaaaatcaagaaatagattttattttctatttttaggtgcatgttattcctcgtcaccaaccggtttattaccggtttatcaccgacccggtagttaattgacgcatttcgatcggtgcagcgggtaattggcgcaggtaatctattcttttcgagacaagcgggaacatcgtcaaaaacaagcccgctaatccttgcccgttgtgttgtttttctcggtgggacctgtacctcgatggggctcccgtgggatgccggtgaggatccagcaagatgatccacggaaaagcaggaaacccgagatttgaagagttcacatccacagttgggtaccaattggccacccgattggacaagataaagaaaaaaaacaacgcacaacatggagaacccccccgagggaataaatacaatataccagcaggccctaagaacggcaatgccagcggttatcacgacgggcagacttgatatcgtcgacggtgcaacgagccaggcgtgtgcaggattcgcatggaccaggacaggtgccgaagcaccttattgacgaggttatcatatcctgaaactatgatccaccttgtacgccaattgaggagttcaatgaagatcctcgtggcgtaatgggggtggaaattgtcccttttgttcggtcatttcttcttcttcactctttttttttctctacttcgttccgttcgtctgacacctttcccacgttaacattgccgatcgtgcgggtcgaatcagagtcattatgagtgggggtcgtccgagggcgagagtaagtcggagcagaactatcagctaagaaaccaccatctaacaccgttccagtccgatgctctgccacagtcaccgaaccgcaaccgagccgccagcgatgcagattatacctcacctaggagaactacctcacccaggagaactacctcacctcggagaacttccgctgaggatggcggcgttcctcggcgattcaactcgaatacctcgacgacacaaagtaatggtagtgcactacccagtttgatcccgcgcaccacgcttgcgcagcgcacccagggcaaattcaccctcgctgggccggatggaaccccccagctgcgtctggcgcaggaacccttcgtccagccgggctacgcggatctcaatccatcctatgaacaggcctccaacgccagaccggtctggtcgctggccaaaccgttgccccgtgtggtgcggccgagtatggtgccgaccaaagatgagctcttgcagaacatggcgaatgcccagcggcccacggagaactcggataggttggggctggacgtggacccgaacgatgtcgagcagggtcgcattgataagacgtccgatccgcggaagatggctgcccaggtgaaggacgctcggttgcagcgtgagaatacctttatgagtaagattctcagtggggatggcggcagctccatgagacagacttcgcgcatgtcgcgttcgtcctcgatcccggggagacgtacctcgacatgggatatgccgccgccggatcaacaactgcccactgtagaagagggtgatcatccagccgaagatgaacatgaacaagaagagcggccgatgtccgctgacgagcagttccagaataatcaagacatgggtgcgcgattggacgaactcttatcgcttcccgaaatggaaaaggggaattaccccgaagacctgcatccgcttgtccaggaactggtcgaagacgaagtgcacaacaaccacaccacttggtccgtcgtccgtacacaccaccgcgaggctctcgccgagggcctgggtgtgtttgtttcgctcaccatgggcttcgccatcgacgtgtccgtcacagtcgccggccagggtaaccccaacacaaccgcctgggcctggggcttcgcaaccatgatcggcatttacatttccggtggtgtctccggtgcccatctcaacccagtcgtgaccatggtattgtggttcttccgtggtttccccgcccgcaaaatgcccgagtacttagccgcgcaattcatagccgccttttgcgcgggtctcgtcgcgtacggaatctactacgaatccatccagaactacctcctcaccaacgccgacaccggaatcatcaacagctttgtgacgaatccgcgagagtcgtgggtgagtcataccacagcgttcttcaccgagttcgtcgggaccagctttctaatcgtcaccattctggcgctgggtgatgaccagaacgctccccccggtgccggtatgaactcgctgatcgtcggcttggtcattacgtccctcctcatgtgtttcgcctaccagaccggcgcggcgttcaacccgagccgtgactttggtccgcggcttgcgctgctcgctttcggctacccgaactcgatgttcacggacccttactggttctatgggccgtgggtggggtgtgtcggaggtgggtttttcggtgcgttcctatacgacttcttcatcttcaccggtggtgaatctcccgtcaactacccgcttgagcgcacccagcgcgctttgacgaagagtgcaatgaggtggaggcgccgactgcgattgaaaccgaaacagtgagactgtccggtcgagtgtggaatattgtgtttttctatggcgtttgagcggtcactgtttttctccctgcattttgtaccagtatgtccggttaaagaggctaaacatatatcaaataatacccaaggcctagtggaataggatgtttttttcgcatttcatgtctgagcagggtcatcctggcgttttcctgcatatgcaagtttccggataacaaggaacaggtaatacaagacacaaactggtttgcagaataggcatgcaggttgggcatccgaatgaaaatagaactcgatttacttacatcattgagttattttaggtttgtcccttcctggggcccgtgacccggcttagtaatctggatggaccgtgggtcttccaaattggtatccaattcacgtgaatatctcgtctgttaaggttaagcatttgtgtcggtacctaggacactgccaaaccaagttctaacatcatgcctcaatcccgaggtactataactgatgtcggagtcccgcgctcaacctcgccccgcgcgcgaaggccactgcatgagcctactccctcgtaggggtctagggcgcaagcggctcattcctagtgagcccctttctttcaagagggcagctcgatcttccagatacgctttgtatgccggtttcgggatagtcttatctttgtcctcccatacttcatatctgacttcatcctatacttgaagttggcgagtaaattttgcgcttggtctaacgcttcgttttgatttcacaaattcagacgcatcaattggcgggatacgcagtttgcgcataggataggcgatgatgatcgttggcgagtgtgagatgctaaggtcatagtgaaccaggatcgtctctggcttgtcgtctgttacgggcttattatcaatagataacgaggacaacgaagaaggagcaggtgatgcaagtttgtcgatgaagtcgcaggtattactcatatgaataaagagatcttgcgttgatgagtctatagcctggatccatttatgatgatgcgctgcaactgtccttcttgacacccccgccttccccatcgggcatcagaaatagagatgattactttgacacgattcttcacatgtatttcggtgttccatgatgactcgagattgtgaaattgatggattgggcccgcctatagtttccttagtcatcagaacgtgccacctgaccctgtttatcgacgtttatgaatttacctggatctatataatcgaacatgggcttgagtaactatgtatgcaagttgtaactccagttctcggtttttcccactgagtagcctcttgatgctacttttagaagaaacactaccgctagcctgagtcggttcggtggcttaggtgcacttagtcatgactacctcatgagtctatggtggtgcacgcagcaccaggggtctaatgttactccatgttgctcaagaggttatccttgttatctttgtcgttaagaggctcattgtagctagttaatagaatcgatagacgtgggggcacttaactaccccatacaatagttattgtatacctaaaataaatagagggtctctaatatatatttgacacgttaagctctttatagggctagtatacattgggagcgcgttgggcttcttggcaagaacatacagaacaactagattattccagatatttaagcatcgagccaaatcctctaattatgtatttatatacgtgtatacaagatatatgtttaatgcaacacttccccccttttcccctctcatataggtgcatatgtaccctgccacacatctatgtcgatgtacacaatccccgcatgcaagattaggtcttggcccgaaggcccatcgcgctaaagaccaccgtcatcgctcaccgttttttctccgtttccccccatcaacttcggaagaaatttcaaaagtggattattctattttgattgtatttgtttgttgattgttgacacatttccgcccaaacgcctatttctgcacgttcccattgtcttgtgctatctcccgggtcgcgcgatcaaccgctgatcctgcagctctggcccatttccattttctcttttcttctgcatttcactattccaccgccattccactttcttatactttttgtccctcgatcttaatctagtcctccatcacattttgaacatggactatcgacgactacaacactcatacccgccacggccctcgcctttgggggcctcgcaagaacctcgcgatccacacttcaccgcgccttcgaccgagtctcgtcaagagattgacaagtctcgcccgtacccttcccccgcttcaaacgctacgtcctctccgtcacagctctaccagtcagcgacttcccatacatcgaatacccctcgtggagatacttccagcgcatactttccgaggaatggcccaacacaagcacaccgtcgacatgggagtctcgagacaaggaatcatgaacaaatgcatcgcaggaataattcgcaacctcaggctgctcgttatcgtgaaggtaggcaatctgtttggttttgtttttactttccctctgctcggatcccccagattgaggattccaaggatcggacttgtgccgtggttggtccgtcctccgcagccccgtttctgagtatgggcgaccgggggaatagtttccgtaatctcctgattcagatgctcaaaaccacgcgacacatcaaaactcattctccaaatcctccccctcttcccttgcccagacaccctgcccctgatggattttccccggtggcgcagatcgactggacgacagctcgggaacgctagtccaggtcgggtctagtgcacacagaggagcccctgcccctttcggactagcgtaggagcttccggagtcacgggttctcctcgctctggcccttgctttctctttgaaccattgctcactcattcacagggctcttaggtgcctccattatgaataatacgccatcacaacacgaaccagcgcgtctaaattcccaggggaacagtggaaatcctggatttcctggtaagcacccgactgaggcccgagagccgtgcaaccgtccttgtcgcgatacatgcatttcgtcacttatgcgaccgggacatgcgcggtcatcttgaattgactcgctgtatcaagggatatttggctaactcgaacccgtctgataggtccgaacgaacagcccgcaccatccgcgtttggaaatcgccaaatgccgcctccttcacccccacattcatattccgcgcgaccccaatcaacccacgcgcctgtgggctctttgatggcgcgcgatgtacctagcagtcaggcgctccgaccgggcagtagcatgtcgatttccgctatgttaggctcggacccagatcggtctgcgcgggaacctgcacgagaatctgcgccgttcttttcgcgaccacctgcatcgtcgatattcagtaacgcaccatcgtcatcttccgccgccatgtccccacccaacgccccaacaagaccatcaccgctcgaaaactctttcttccgtcgttcgaatacaccagagaagccattctccaagcctcaaggcgcccgtacctaccgatctgggtctggtgggggttcaactgtgggcggagagcagtcggtgttcgggggcttgacgcgctcatcgctctcacagtatcccgagaagccacactcgacgcacccttcacctagaatctccacggcagagccaccgtacaacgaacctcgtcgcatgagtctcaacggtccgatcactcggcccagtagtcagccaccccatgcagacgcacccacacggcccccgggctacagtccgatttcccagcccggaggggtcgcggatcgtcctttcgagtccggccctcggcctgcatctgggtcgtacgggagtcatgatccacagcatggtcggtttgcaaacatatttggcgagcggcgctcggaggatactgcacagcgagagcgagaacgcgctccagcgcatggatcagacgccaagttgacccagcctggatcataccggtatggctcccactacggcgaacgtgactcgctcgatcgtcaccagaacggctctacatgggacctcggtcgctctcaccctccgtcgccggagagtaagcgcttccctgcccccgagcccgggtcgagtttcgggtttggggccattcaaagctacactaaatcactggggtcgcaaccgggcggcagacaacctcgcctcacgcttcagtctctaaacagtcaaccaactcctccgccgcctcatgatccgtatctcaggcaccaagggcagcctccacgaatatcatcaacacctgctatcaccacatccacagctgccgcgtcatcgggtttagccgccctggctgatgagggacgccgcaaaggaagtgatgagctgctccatcatcgcagcctactggccgttggcgttgatgggaaacgcggtggccgtgcatcgccgcttccccaggctgtacaaggcgctcaagctccatacattggtcccgctggagagccagcgatcaagaatgaactagggcgagtcttctccggtattggcagcggcgtgggtggcgtcaccgcgactactggtggcagcgggccatcgacaccattaggctctagtcctttcaagcgcgatagcctcacgggccgctcaatgaatggagaagggatggatgaggcgtctaagcttgctcgaccatcctctgcagccggcagacggtcgaaaaagtcgcgcgacgaggagcagatggaaattgagtctaatgatgcccgaggcgtactatcagcacgtaacgcccgtcgttctcggcattcccaccaccatcaccatcagtatgttctacccaatcaatacagttgtcgtatgctaatattcctctagccatcaccaccatcgccacaaggcagacgaagaggcggctaccctgagctcccttcaacgttctagcttcttccatcgaacatccccagcggagtctcctgccgcacaccatcaccacccacattatcaccatcatcaccatcatgttcctcgactcactattccggttacatctcctatccgtgagcctcgtactaccgtgaacctggaaccgttgctttcgagtgtggcccatcttcctcggcaccaccttggctcaacgctatacacgccacgcatcagtacccccaccgccaagtcgtctttagatagctccaagtttggatatacatcgaccccccagccccttccccgcttcgaacagcgagagaattgcacatttaccgttcgagtcccccgtttccgaatcaatcaatctcaccgagaggaaatctgcgcccgacgcgcgctctgggggactggtgtttatacagacgactccgaccctgtcgccgctgccatccactccggcttcattcgcggtgcgtggggcgacgacgtggacgagtcaatgcttgatctcgagattagagatacctaccagcacgcaccgccacccgaaaccacccctgagggcgaggctccggccaagggcccacgtctaccaccgatacccccaaccgacaaggacctgcacatcaccctactaattcttccccgcctggcccagtacgacagcactctcatgttcgggctgaagtcccgcaaatgggacggtcgtcacgatggcatgagcttcaagatccatgccgtggactgggtggacgagggcgttgctcgtggcgaagagcgcagcggcgaggcccgtcggaaacgtctccgcacgcttatgcagaccggtcggatctgcaccgggcctgccatggctaaaatggatgagctacgtcgtagcggggtgcaggtacctcgcgccatcgatggccaggatcaaccggcagctgtgcagcccgtctcctaattgcgcaccacgtattggctgaatgacttttgactttttatttccttttccccgtggagcctagtcggtgttctgggtattccaaggtgttggctatttttcttgtcattttcctcttcgattttgttttgttttattggccgggtcaacgggatcggatgaaagggggtttccttgatttattcttcccatctatacataatctagcgctttatttctttcttactgcaatgcgcctgtcatatactccatatatcgtattccgtacctttacgctaaaagctctccccgcattggaggggatctcccggagaaccggagtattaaagtcggggcattttatattttgtgtatgttttatatgttgtataactatcttttatacaatcccttccattcaacactatattagtgcccttcacattctacatatttctccagtgccccagctctcccttgtgactgtaactggggaaatggaccgaggctcgtgggtggagcaggtattggtattaccgtattatatcctttgccccaggttcagatgcatatacaagtccatagtcaacacgataataagagccaatattgaagataaaagacatcaagaaaccaattatccagatctccaattcacaattcacctcttcaccttctcatcgttccccgtggcaaagaaatccaagtcgatcgggactgaggtcatgtatttccccagtccccgtaccgcgttttaccggcttccccgccagccgaggtttctgctttaagcgtcattcggccattctttttattctcccttaagcttcacctggacgtccactcctccgaatacccccaaacgaacctttcagtcaaccagagggatgttcactgcttctgcccgaagccgtctttctaacctgtcaaggcaacgcgttccgaacactctgctcgcccgctcggtaagtcggttacatatgctgtggaatgctgcggaaagcagtgaaatcgcccgggatcaacccattgacacgcatatagactctcaaaatggctccccgacgagcagcatcttccgtccctgagggttagtaacacagacgtccggcgcgacgtgggcacaccggatcaaacgctgacagaacagcaggatacaaggaggacctctccaagggcaagatgcttcgtttcgaagactccctccccagactccccgttccctccctagaagagaccagccgtcgatacctcaagtccgtccacgctgtcgtctccgagtccgagtatgagcgcaccaagaacgccgtggaggaattcgtccgccccggtggtcagggtgagtctctgcagaagcgtcttttggctcgtgctgccgacccgaagatcaagaactggctctccgaatggtggaaccaggccgcctacctcgcttaccgcgaccccgtcatcccttacgtctcctacttctactcctaccgggacgaccgcgagcgtcgcaacccagccaagcgcgctgctgccatcaccactgccgcgctcgagttcaagtcgcaggtcgatgatggctctctggagcccgagtacctccgcaaggagcctcaagccatgagctcgtaccagtacatgttcaactgctgccgtatcccctccgagggcgcggatttcgctcgcaagtatcccgcttctgagaaccagcacatcgtcgtggtgcgcaagaaccagtatttcaagctcccggttgttgtggacggtcaacagctcaacgtctctgagttggagaagcagttccagcgcatctacgacaccgcacagcccgcgccccctgttggcgtgctgactgttgcggaccgtgatcactggaccgctgctcgtaagaccctcgttgctcttgaccctgccaatgagctggccttgcaggatattgagtctgctggcttcgtggtctgcttggatgatgcgcgccctgtcactctgactgagcgctgctcacagtactggcacggtgatggctccaaccgctggttcgacaagcctctgcagttcattatcaacgacaatggcactgctggtttcatgggcgagcacagcatgatggacggcactcccacccaccgcttgaacgattacgtcaacaacgtcatcttcaacaagaagatcgacctttccgccaagaccgtgcgctcgcagcttgccgaccccaaacccatcgacttcaagctggacgacgccgccaacgaggctatcgacttcgcaacccagtaccaccgcaagcagatcggctcccacgagctggttgtccaggcctaccagggctacggcaagggtctgatcaagaagttcaagtgcagccccgatgccttcgtccagatgaccatccagctggcctacttcaagatgtacggcaagaaccgtcccacctacgagtccgcctccacccgcaagttcgccgaaggccgcacagagaccacccgcaccgtctccgacgagagcgtcgccttctgcaaggctcacgaggacagcaccacccctcgcgaggagatcgtcaagctcttccgcgctgccctcgcccagcacaccaagtacacccaggaggctagcgccggccacggtgtcgaccgtcacctgttcggtctgaagaagcttctccagcccggcgagaagctgcccgagatctaccaggaccccgcatacacctactcttcctcttggtacctctccacctcccagctgagctccgaatacttcaacggatacggatggagccaggttattgacgatggtttcggaattgcctacatgatcaacgagaacaggtaagcactagcaccccgaccctttttcattcatgcatatctaactaatctctccagcctcaacttcaacatcgtctgcaagcgtcttggcgccgaccgcatgagccactacctcagtgaagctgccactgagcttcgtgacttgctcatgcccgacttggctgcccagcctgagaagccgaagctgtagatgtgtcttgcatatacccggtttttattacttttggtgcttttggatttatgtttccttactccagcgcctgatagatgaatatatatttttcaacttggaatgtctgtacggagtatttacacttgttattgtacacaaagtttgacttgatctttaccttcttttatttgaattgatatatttattcttcgtatacatttttctattctagaatctatcagaacgatagtatttctttccccaggtattagctagcattagttcgtttagaccaatgaaacccacctttgtgatgtacgatcatatgtcctaagtcatatctcaacgtagttctatatgtcaagagattccgaatatcctcaaatatcaaagtccacgcaactccgagagcttcgcaggagccacccacatcggggaattaaagccgtctacgactccaccacgacattcctctccaatcactgcaccaccactctatgaatcagtcctttttcgtcgtttctagcccaaaagagccagaaataatgtcggtgatacgaccacggcccgacgctatagcaccgttacgcgtccatggcgtctctactatcaaaaccaacgcccacctcaatccatcccttagtcttgctctcctcaacagagatacatgtactccgtacatacatacccattgaacaatgcggtacacagagaaatgcctctgggccctgtccctatccctaactctctgttccccatcgcaagcattcaccctcgataatatcaacacaacagccaacgcaaaccacatcttcaactcaatccagtcaaccctccgccactatgaatcatccatctacccaaatggcatgtccttcttcatagccaccgtcgaaaagggaacacgcttctaccacggcaccgggacaccagatcctatcgtcggcgtcgaatggctagcctttaaaccgcagcattcgcttggtttcgcgcatcgtgcacacggtcagaagggattcatgcacaagaatgatgagcatgaccatcatcgaaaccaagatagagatctagatcaaggtcaaggtcaagatcaagatcaagctcctctgggaaatccccctgtccatccccacggaaacacaaacacaaacgcaaacacagaccccgtcaacgcgggctacctccacacctacgccgccgcaaaagacctccgtctcctctacatagacggcatgtccgctggcccaggcggcgccctcgagtcccaggaccgcatcctcttcaacgacaccatttcccatccggagcccggcccgcgtccgcctgtcggtggtccgccggaggagaaggagcgcgcgttccagacttgtcggatggtgaaggaggtttggggggagagggttgatggtattgctcgtaccgagggcgattttgagattattctttgttcgtttgagcgcgatcttgaggttgtggctattacgcagacgaagcctcaggttggtggtggtggacctggtggtggtcctggcggccctggcggccccggtggtccaggtggtcctggtggtgggagggggaggaagggtgggaggaagggtcccggtggtcctcatggccctggtggccccggtggtcctcgtgggcggccacagggtggtgattgttgctcgatcgatgcgcggtatgatcggttacttgggcagaaagtccgtttggatttcgatcactttgtcacggcgtatgggtacgaccttgatcttttccctggggattcgaaaattccgttgctggatcatattcccagtgaggagtttgagcctgttcgatcggacatcaatgagatggttaacactcttcggccggttgactctccctttgattggcaggctgttgctgatatgattgttttccggtactcggatgaactgcggactctggcagctggcaatttctcgtcggttgatgtccttcggacgaggattgagggtgttttggagccttttattgattatagggactttggggccagggaggatattgttgggttgtgtcagaatgagtttattcctgcttctgctcctgctgagtctcttgctggccaggttgtgtcttccatctctcgggaggtctgtgatactttggcatcagggctgttggatgggaaggatttggatgagactgtggagagtttcaagcagcttgtttcgttcttgggctggactacgtggaagtaaggatgggtcgctattcgagtgagactgttatttttagactcggatagtaatgccaattaggtcttgtgcaagggattaccttggataattgaagtcgtttattgcgttgacgcagttcaacttctgagtatttacgtataacgcaaagaatgaagtcgacatgtattgtcatggatttctatattaatttcagtttcccatagacctcgccacttccaatgggaagttttgctagcgacagcaacaggccatgaacttcatacaaaacactgtcagaactgcaacattgacaagcgcatagagtcacatcgccacgaaagaaatgggaaccgtcctcgaaagatgggatatactgaccctcatgaaaatctaggcgccaagattgaaaaatcgaaaccggttgcttgcgggaggattgcctgtggttattctgtggtattgcatagagtattgaacaattaggctgatgtccgggttctcgcctgtatcactcatatcacccctgtgcgggtcaacgagctacgactcgtgatgaatgcacttttcagtctttaccgtctcgcgttgtactcacggcaggcggggccgggggtttggtccccgcctgccccgacgcaaannnnnnnnnngggggcggcccggttttcccgccccccgctccccccgacgcaaaccccgaagctgttgttgcggaggcggaggacgcaccgtgggaagtcgtcaggccaccgatttgcctctctgtggagaaaattagtacggagtatatgtatggagtacgcgcttaaatcagatccactctcggggtggggttactccgaattactgtgggctcaagaaaaaaaaaacgctaaaccggaattctcttacctagttctcggatgcgttgccgaaggaggacgttttctcgggctagagagctcgcttcggcctggtaaaatgcaccctcgtcccggctaccgcgccgagatgcactatcccgcaaccccggaaatggctccacgctttctccgcgcgagtctagcggtcgcaagttcggtgacgccgcttgactgggaggccgcgagcttcggcggtttgatgaagaagagatcgataatctattgccgacaggaggtgtcgggccgggtgggaagaaggccgatcgttccgatgccggagttgtgtcgtcgattgcagcggtggattgtgggttatgttgctgctggtattgatgcaattgggcctgctggctgcggatcatcagaagaagccggttctacatttcatagttactcggttagcttcctacaaggctaaaagggatgattgacctaccacttgtgcttcttgttcttgctccagctcttggtgtagctcccccagcgatggtgcacgctggtgatgaggatctgctgtcgcaaagatgggacttgacgggctggctgtgcggaatgcatgtccgatcgggctgcgatggtcacggtggtctaacgcgggtaactcgctgctaggtcccggactagtacccagcatctcgttcacgttcgaattaataccggcagtggatcgacgttcagataccgatagtcggcctatgcttgagccacgggatggccttggtgagacagtgttcgggttcacgggcaccggaccagttccaggagcggccatattacgttgcgggatggaggaggaggttgaagaggaacgggatggaggaagggaattcagatccggtgacatctttgattgataactgcgttgacgtcgaggaatatgtatgatgcgaagctctaatctgtagtaacgtcagataatcccgtgaggatctgctgactcagccaccgctttcgcggggtcggtcatgtgacacggatgccgtttatggaaaccgacgccagaggctgaatggctagaatgctccagcctgtctctacaagacccagtctgacagtattacaccccgagtgaatatggtacaactcggattctttctctcggggcttatatgattcttccggaatatggaccaggccagactttccacgggtacgaaggtcacggcacagcaaatcatatcttggcccctggttgcgcgcaggccaaggagaggaacacgccggtttctctatgtggcgctcaaatttacaatttctaagagtcatacttctataccgacatgtaaaacaaaatccggggatggccgcaaagatcttcagtgtcgcgtggcgctccagatacgatcgacaaaaagcacgagagtccgggtccgggggatgtgggatggactgtggttgtttccggataacgtacattccgtacattcccccttgaatgtgactagcaaaaccttctttttgcttttaccccagtgggcaatggcgggtatcggtaatcatggggaaatgtcctccgagtgaacgattctgcaagggggagatcaggccatctgctggtaatgcggttatggttgtggttgtggttgtggttgactcgttgactggctgacaagtacgtaattggcggccttccactcgttattctggaacgtaaagccgaaagatgaccgaagagcaagttccctcctttgcagatcgaaggatttgataacccgacagacaaagaaaaaaaaaatttcaatcctccgtactcagccgattacaatgtaagcgaagggcgtgctctggtcagaacaagagttatggctgccaagccctgatgacgatctaacgccacgcccgtaatatgaaccacagcgactctagtgcatttagccgcagtgcctgtcctggatatgattgacgaatgacctgatctcttgtggttaacctgacgtcacatatgggcaaggcaagtcatgggcgacttggcaatatcttgttttaacaggaacacgttgagtttggagggagcaatgggcgtttttttcttccccacagcgtttttttgtttttttagccccttttgtcattttttgtacccgagtccactccgtaccacgcagaacttcagtcgcatatggagaaccatgcggccgggcacggtcggcaataaccccggctccttgcttcgcggggcacatggggtttgatatcccgatcgtcggtatacttgggtgtagatttgacgtggcatgtaagaagatattggacagactcgaagcggacattctctcggcccagaacggcaaacggggaagtcgactggacatgaccgtagttgtctccaatgtgggtccgattaccccaatgagagggttcctattccggctaattagccctggaagtaccagaaagcatcgaatccttttcacccatgggctgtatattgaaggcaattccgtagacgacaaagcgtccaaagaggcaaaaaagggacagaggaaaggggcaaaaggaaacggatctgaagagtctggagagaagattcgaagtctggagaaaataaagtggggtaccacgggggacatcggcatcccgtgagtgtatagtcagtaccaagtactccgtacctcaggtacattggtaataaatccaggattcattccactgaggcaaaagtattcaatcacggaacatgcgacctggaaacttttgtaccgacctcgtactaacccggtactggaaatgtactgacagggccagcccgggggaccgttttggttctttcctgcatttggctcttgcctttttctccccgtttctgtatttaattcctccttttcctcttccttttgatcttcactctctatctctttctctccattgatctttctccagactgcttgagacttctccacactttcttgtctcatttcctggggtttcttctactatcaactggtcttgataccagtttaccctatactaccccatctctacacaaagtgagagtcaacaatgacgaataacgccgacaagtacgggagggacaccgtgcaggcagcagaagctgcccacgcccaagccgttgtcaatgccgctacggaaaagttggaagacgatcagctcgaggaggcctcgcccacacccgatgaggttatcgagctcaccgaggacatgtgctacgacaaactgggatactcctttactgaaagaaagaagtggatcatcattgccgtgatcttcctcgttcagacatccatgaacttcaatacatcgctctattcgaacgccgccactggaatctcagaggagttcggtgtctccatgcaagctgcccgttgtggtgccatgatcttcttggttctttatgcttttggctgtgaactctgggccccctggagtgaggagctgggtcgcaagcccattctccaggcatctctcttctttgtcaacatctttcagctccccgtggctctggcccccaacttcgcctccatcatggtcggtcgtgccctcggcggtctctcgtccgctggtggctcggttaccctgggaatgattgctgatctgtgggaacccgatgatcaacaatacgccgtggccgccgtcgtcttctcgtccgttggcggatctgtgcttggtccagtggtgggtggcttcgtcgaggcgttcctaccgtggcggtggaatatctggattcagttgatcttcggtggtttcgtccaagtggcccacttcctgttcgtcccggaaaccagaactactgtcatgatggatcggattgccaagaacatgcgcaagtccggcgaaaaccccaacatttacggtcctaccgagggcatgtcgttccgccagcgtttcccgccccgtgaaattttggctacctggattcgtcccttcaagatgttcctgactgagcccattgtattggtgctttctctgctgagtggtttcagcgatgcccttatcttcatgttcatccaatcgctctctcttgtgtacggccagtggggcttcaacacctgggagaagggtctggccttcatcccaattttggttggctacttcatcgcttggttctccttcttcccggtcatcacacgcaacgtcaaagagcgccgcgaccatcccgagagcgaacgggcacagtatgagtctcgtctgtggtggctgctttacaccgtcccctgtctaccaatcggtctgatcggattcgcttggaccagtttgcctcagtgccactggattggatcgatgatcttcgctgccatcattggtattgccaattatgctatttatatggccacaattgactacatgatctgcgcctacggaccatactctgcctctgcaaccggtggtaatggttggtcgcgtgacttccttgctggtgttctcaccattccggccacgccgttcttcacgagtaagttgccacattccacacatttcgcattatcatactgacaatttttgacagatatcggtggcgagcgccatcttgaatacgcctcgactattctctgtatgtctatcctttcctgtctcttcgcatgagccagtggtctaacctgttcctagtctgtatctccgtaccacttgtcgttgcggtctatatcatctactggaagggcccgacattgcgcaagcgctctccattcgcccagcagctagaggatgctcgacaccaaatgcaggtgcagagccgacgagggtccaagatccctccggcatcacgcgccagttcttatgctcgctctcaacaagatcttcgcatccgcccaacaatgggtagccgaggcaactcccgggtcaattctcaagtgaattcccgtgccaactctcgcgccaattcgcgccgcaacagcatcaacctcaattcttgatcgctgttcgtttttgttttgctttctgctgtgaatactcatacaatgggagtgagattactgtcataggaatctatgagaattttcacatcccctcttcgtgcatgcgccaatcctacgctgtgcgtggctggcactaattcttgcacccgacgctcagtggatatcccactcctggtctgtggctttttgttcttgtgcacttcaattatgatgggaattggactggaaggaggaaagggcgcgggttttaaaaattaattgtcttgtttttttgtgtttgcttccactcgaaaagacaagatttgcgatctggggagtgtcatgtatgctatgggtttcgtgactgagcggtaccaatcatgaattataccattattattcgctaggaatgctttgtggctatcagtatgttaacttagtaagggtggagggaagatattacctgcagcagtatctcgttcgatctaatacatcagtgtctagtagtacattagtacaacatgaggtcattgacctgacctagcaccaaggacacggtagagacatcctatcaatgcctgtccggctccggccgggactggatatgtataagtcaataaagccgagggtttgattctaagcaagaacccgcttagtataacctgtggagtcgctacactcccacttgtaccttcgtgcttcctccaacccggggccagacctggttagggttagtgccaaatgttaaaaggacttctggtttagtatcactttacattgaacctgggcgggattgttatatgacattcctaggtttatatatatacatatcgacagacagatggtccatgtttcaagtgggcttacctccgacatctggatatatatatctactcacttattatccctttttgctgtcgacaaaatggactagtcataaatgcacatacccgtggacgacaacttaaatctaacaactaaggctaaatagtaggcgatgacaggtctcgagtagaatggtggaatggtgcagtctatacaaccaacgcagcggagtgttgcagcacgaattaccgatatttggtgactttgcgtgcattttggaagatagtagcggaatctccaagttcccgccaatttgatggatgagaactgcgctaatttccaggcagatgagtattggaattgcatgtcggtcaggacttgacaagaagattttctagcaataagactctttattatgcctatgcatggtctataacttggggttcacgacctataaagcatttcccccacctaggtaagtgcatagatttggaataaatcgcacatctgcagttctatatcgaataaaatatgaatacatacgccgtacatgatgtatgaacaaaaatagcatcatagaggtctcagccaattccgataagacactcttggcccgtgcgcctcgacatgtaccaactttccaattcctcgacataacactctgtacctactttgtaccttagagaatgaatcttgcttccatgcgtctctgtgctagacacatctccaataccagacctctcacccgactccccagtctgcacgcacccgcattccccctctcgcgtccattcccgagaatggcatccagcgcgtttcagttcgccgagggcgaggatgcgcagcagcttgcgcacgacgccgacgctttattgcagcggggctgggcgcaggacggagacggaatgggggttacaaaaacgttccattttaagagttatttcaaggctgtggtgagttgtgtcatttgtctggactgggactgcttccgctctgctgtgagactggtttaactgacaatctcctccgtctaggcgtttgttaatatgattgcagccgagagttcgtccaagaaacatcatcccactatgactgtggtaagtggaactttttgagttggtgcctcgaaaaaaagaaattaaggctgacgcctcgttagcggattggctcggtcgatgtgcactggacaacccatcgccctcgcgggttcacacaaaaagatgttacgatggcgcagcattgtgacaagagcgctgatctgatgggcgctgttgatcccggccagggactgaaatgtggtccaactgtctaggttgtcacatttcctcgaatttgcgtctcggcacttgcagatggttctttattccccccggtctggccccctcgacgcacactatcaccagtagatccccccaccggcggttggaactaggctggatgcgaatttccccttgaaatccttggtctttttttttttcttctctctctggatgtcttctttctctcccgaaagggtcgttcctcgattgcgatttcaatctcgactccgatttctctctattacacatttatagatatattcaaacggctatttattgtcggatgtgccatgacgtcgagtcagtccatgcccacgttcccttccgatgatcattgcctatattaaacctcgtcgctcctttttctccaatgcgctcgacaccctgaaatcccgaagtcttgaactgtctagagctgtgtggaactctgtgggactgtcttgaacgcgctcctcgacaatgaatccagatccgccatcaattggcgaacgcagaggtcatcgactcgcgcccctacagaccaatttcagtcgaccagctgctcaaaaacgggtacaacgcccacggccaaccgagtatccaagtaccaatggatcagaaggtcccgttccgcttcagtcccacgttaaacggcagtcctctaaaacgagtctgcgcaatctctttggtcataagtcttcgcgcgcagaccccaaattggaggagattatggaggcacagccagaacctcaaactgccattctcttggaaaccgccctgtcgccctctactatgagcccccgaactatagactccaatcccaccattacctccccgacaattgcatccgcgacagaacgatcgcgcgcgacattgaagtacacccgttcgaaacccgaacccgacccttcgagccaggaacagtatggctggaagcctcccccattattccaggcctatccccaatccaccaagcatgactgcctccctgcacccgctctctctgcagattctatcttgcgcctgcacgctacaactacaaggagctctactgacgacaaccctgccaatccgttagagcaggatgaggctgccgatgccgctcgtaaaaagcgggaacaaaagcaaaaaaagcatctccggacactatctggcaccatcaacaaggcggattggactcagaaagtatatgtcctggctactaccggctatattctccaatatgcaggcgaaggaaagcacgaccgtcttcccgagaggatgctgctgttaggacctaagtctgtcgcatttgctagtgacgctatccccgggaaacattgggtagtccaggtctctcacaatccgacaactgatgattccgccgtaccggagcctcccaagcatcgattcgcgcgctttggcttccacaaacatactagccggcggtttgcgcgcaactttcttttggtgtttgacaatcccgaagatatgatcagctggttagcggctataagagctgagatcgaaaaacggggaggacgtaaattcacgcaagagaagcaatcggacgaagacacaatgcctcagctgcggtccaaatcaagcgttcgacaaatggtaaagaaagatccccatcgcatttccagtcttttccttcagcctcagaccctccaatcgcccgccgaggacgaagatggccagtctgtcggcggtgccacatggcaatctcgccgcagttcatatgtgtcggttaatcgtcgctcaataattgaatctcgatccggatcggtgtcgactggccgaaccgacgccacaaatcctaccaacggctctgcttctgtcgtgtctgacattcattcttcatcattcacttcttcgaatatacccaactcgccgccattaggtaccgacgctttcaggcctgatgagcctgtgccggaagagcttgaccgagtctacacgcgcaccccgcccgcttctgtccatggaaaacgacaatccttatatgttcccctgccatctcagcctccccctattgccgacttcacagaggagccacaagcgcatcacccaccagctattcccgaagctctcattcgcagcgcttcacctccagcgcctaatttcagtgtcccctcctttagcaagaaatttgttccgcgatccgggccgatccctgtctctcatgcctctcccccttcatcactcaatgccttttctcgtcatgtcgacaccgacccaaatatatccgcctttgcatctcctccgcaatctccaacattcagcgtcgctagttcgcgctacacagattcatcagagcccaagcgcatactacgaccctcgaattcagaggatgccctgaccaaagccgttcgttcagcacagaatgccaaaaacttttcccgggcacccagcacagcgcctcctacgtgccctctacctgatcccagagcatcttcccgtccactcagcctggtcggccgccctagcatgagtcggaaaggcgcctctgcatcacaggtccctccaccagcagatccaataccgcgcaagagagtctccactatgtacccgaacaaccaggatggtccgagcatgttgcggcgcaagagcatgcccggtctgggattatcaatcgggcctccatctgcaccaccccccaactgcccactccctaagctccctccacccgcccgtcctaccgtcaataccactatccctactgcttccaccggcacgaccgcgccgcagatgctatccccctggtctgcagcgtcctcaacgcaccgattctacggctcccagccagtgcgtgatcacgttgaagatcgcaagagcggtgccgatcccgcaaacagtgacccagcaagcaacatctcacgaactgcccgacactcaaaactgatcaagagccccgtggtctaaatccaccctcccctgctgtgactcaacatcacatctatgacacttcacctcgctctaacatcgattctccaaaaccctacgagctccttctcacgacattaccttgagatgcattccctataccctttttcctttctcgcatctgtcattactatatctggcatcgaggcctcggcctcataatcaaatacccctgttgcacctattgcatatctgacagcctatcatatccattctcttgttgcgcacttcggtcgtaccaaccctggcgtgcgtacgttggttcctcttttgtctttactatctacagattgcttctcttcgttgcgtttgtgtttttgtatataccccgttttattctattctaggagcatatctcttccctcttctgaactcggtatcttctgtcgagaagtataagtcacggagatccgagcctgtacattaccatatttccttcttatctagcatctgaaatatccgaatacaagaatcctacatcgatttgatgcccgaagagaagttgtgcaatgaattaaagacagaaataaagagaaataaaggcgttcccaatgatatcgattctcagagcaaggcctaaaacgccagaatgaatatggaatatggatcttgaaaatacaaatatcatggatggtttgaaataaacacccgcgttggacctcgttcgaccaattccggtctatcggctttgaatatcgttcacaacgtagactactcctccgcctcttccacacttgcgctcagaactcgtcgcggtgcgactgcggatggggtagaagttggctcggcggaggttgtggttgccgaaggggcgttttctgaaggggcagctgagggagcagctggggccgacgcggcaactggggtgggagcagaggctgaggtcttggatttgctagcctttttgctctttttcgtctgtagggttgaatagtcagctttacgatgtccgaaaatgtgtcaatagagaaatgcgtacctcttgccagccccatagaggcttgaaactatcgaagaacccaacatcctcaaacagattggggaatagccagagacccggggccacagtgaagacggtaatgcagaatagaatcaaacggaagatagccatggcgaagaagagacccaacagtcccatcataccaacactcaaataccacactccctggcgcataatcataggccacaacgggaacaggacaacggcgaagataccggcaaccacagcagcggccatggccttttgcttccactgcgggccgtcatacaaccaaacataatgcatcatggggtcagtctcttggtgctgttcgatcttcacggtccatagacccttggtgcgattcttgggcttggcatggttgtggccttcatgggcatcaaccttgctcactcggagagccaaaagggaaagtggaagaagcttgaaaacgttctcggcggaggcgcggtcggtcactggggggaggagggagttcttctttgaggcggctttggcataggcgggggattcaatggctcggattgcgcgcttgactacattgaatgaacactgttagatggcgattcctcggaaatatttagatcttggtcgctcacccttgaacatgtccttgcgctgtccgtccatgatacatgtgcgtggcttgaggttctgcgaccgcagccagttggccactgctattgcctttgggtccggggggttgttggggttcaccgggacctgttgtgtggttgtgtgttggtgctgctggggtgcgggcgacggagcttgttgtccttctgttgctgcttgggcctgttgttcggcctggattttctgttgctgctggtgggcttgcattgctcgcatgcgcaactgcgcaacatattgctcagtagtcagaccgagctttgtagcatcggcagtcagctgttcacgctgctttgcggcgaactgctggggcgtcatccctcgtttggcggcttcggcggcgaactgttgttgcatcgccgccatctgctcagggctgggctggccaggggtggccattttgaattaaaatacgggataaaaagcagaagagaaaaggaagtccaaggcagaggaagttgtgaaagaaagaaagagaagtggccacattgactcagctgatttgtccgccttcccgacttccccgacttcaatcttcttcccttttagcaacgaacatcaccctagacatgcactgaacatgcgcttcggagctatttttatgtcgatgctcaatgtctgtccaatatgactcttcagaaaccttgttaaacgctacctgggtggctgttcaactggtatgtgtctcattgcgcagttgatgcctccccgcttatgcgaatatcttaattcagagcgaacgagatgtcgctggccagattccacttaactatgtgacgaaccctgctgtagcattgtcggctgcctgtttcggaaacggcatctatgatcaacaagatgctgcacaatgtttctccaacctcctcgcaatcgggtaccgacgttttgttgtcgatctatattggtcggtcagccgtagaacttggtatttctgtccggtgtctattccagtcagccctggggtgactatatcctcagccacctccacaacgaagacaaccacagcaacagctagtgcggactctgcgactatcaccggtaccgacgattcaaatggagacacactctatgagctaggctcatacaagtgcaccgacaacctcgatccctataccttggcggaagtccttgtaggttatttccgagacacaaactcccgtttgaccgtgtacacgacctatctcgttctcaatctgcatgtcgccgcaagtgcctccacgccaaatgagcctgcttctaccatatcaggaggtcaattgccatcgggaaatgagctagccggctcaattctgggaaccgcgcttgatgactttatctatagtccggctcagcttgccacggacagaagcaatctgaaccaatcatggtataaggtcgacgagggctatatgcccatcacggagtattttaccgttcatgaaaatgaagcgggtgaacagagcactccggatggctggccatcatcaaagtacattcagctcgccaaacgcgatcgagtactcattggatacggctccatcgattcccagctgttgaattacaatctgtccaccgaaggaaattcggtctttcctcctggatacctgacttctgatgtgacggtctccgcaaccaacggcactctgacttcaggctgtctatatgaacctgggttcacaagcgtgtctcaaaccaactcatcatgggctatatccagtggcctccctgtccttgatggcctttccacggatgagacgatggcttcgctatcgaatgttctctccggaattacagcttgtggtctctcgccaatgctgaacactactctcttcgaccagactgcagaccagcaagttgaacattaccgtaacttctcactttcctcttcctgggcttgggtacttggtgagccacacgatgcgaactatggcggcggcgacggtgatcccaagtatgaccgctgtgcaatcatggatctaacactcaatggccactggcggtccacgaattgcactgagaagcgtcgtggcgcctgccgaatcggtaattcgcctttctcctgggttctatcagacacgatcgaatctttctctaaagtgtcggacagttgtccaccaggatcaagtttcgctgtaccgcgtaccggtctcgaaaacacgtatctctacaggcatcttctctctctaccagaaacaacagtcgacttgagttccgcagatcccgcctttcgagaggtcttcttagatttcaactccatagatgttacttcctgctgggtctccaatggctatgaggctaggtgtccctatgcctctgatccgcagcaactcgagcgcaaaactgtacttgtcgctgcaattgcaggtatcatcattcttattatcacagccttgactttctttgtcaagtgcaacgccaaccgccggaattcccggcgcaggaagcgcgtcatcgaaggatgggaatatgaaggtgttccctcatgagacactctatacacctgacatgtaccctggaagtgctgtctcggcctttttggttgtatgtcaagattgggtatctttatatacttcacatctataattccaaggatcctgtcctctgtagcatcgaacttgtctaaacgcactcctctcaacacccttgaggggcttgactctatggtggctaggaataaacacaataggcgactttttgaaataatttggttctgtattctatggagttcccttttggctgtctctccttacatggagttcgttatttctagagttttatagactctcttgaatcgtataaagccgaagtttatacacctattcatttagaccgtctagctgttatgcttgatttgaatgttcattaaggaccagaactagatacaacaaaataaaaccataatacataaaacaaaaatccacacatatttccataaaaaatcaaaccaatggaaactggatataagtgtcccaaacaacgctacatgccactcatgaagacaaaccgtaaactcctagaaaagaccctggatatcacattcaaagcccggcaaaccgagcccatcccgcagcccgatttgctgaagagctcggaacctgtgggtgagtttcgttctgctcgtggctgggaggctcatcgagaaggctttcactgcgcccttcttcggcaaccttgccactcacatcgcggcggcgtccgacgcctagaccggcgatgtaactcccgtatgtagatagggatgcaccaactccggctgcaatgccagggcgggcagtgtctgcgccggtgttgctcacgacacggcccttgcggtcgctttcgatggcgcgtggcgaggcagttgacaggtatccattttcttcatcgttgtcgttcttcttgagggccgcataagcagacatcttgctgctgcgtttcttcgtaagcttggtgggcttgcggacgacctgttcacttggatcgcgtgacgccaatccaggattgccattaacatccagctcaccatagaagcgggtcttgggcgaggtgggcttggggctatcgcgtggaacaggctctgtctgtgcctgtgtattgtgtgagagattggggctctcgtgtggaagagacactggctgtgcattgtatgagatattggggttatcacccaagacaacacgccgcacgggatcggtgttctcgggcctatcggtcaggataggttgcggagttggtgggttaagcatgagtgggttaaatggaagatactcgtcatgctcgtcatcaaagtcgtctctgtgatattctgggtctgggaatatgtccatacgctgatcacccacatcttgttcacggcggttatcatcaaggccatagaattcatgtgtggtgagcgacgcatattccccgcgtacatcctctgggatcgcactagcagcacctggctcaggcttggggccataggcaaaccagtctcgaataccactactgacagacgtcgtggtcttgttgctttttcggctgtaaacagaggaggactggcggagagtggctgcgctctcgtcctgcctctcacccgttggcgatagagatcgttcagagtatgccacccaattatcggacaatgggctggcagtatccgaccgatcagcagtacgtgatgacagatgacgcaattgggcagtagcatcgatgatttcgggggcatgcgaggcaactttccgatattctggggcaggtgcctgtgatgtgaagtcatagggcagactcgcgggttgttggaatagtgtgtcggggctggagggatccatgtaaggttctgttggggattccaagtgggataggcggtgctggtaaaaggatggatgtgactgccgctgctcgtcgagcatacccatcgattcacggttgtaatcaccaccaaaagactgttcacgtgtgtgcatgaacggcacactgcgaggagatccaatgagcggatcctcgaagctggaattcatggtggattgactgagatgtttctcgtcggttcgagcctccttgtggcttatgcggggacgtgcggtcaaattgtcttcaagtgggttcatgtcaggcggtaggcgggagatcttccggaatgtgacagccaagaaacccgatatagcaagggagatgaggtgcaacccgccatttgcgatcgccaagatgaaggtggcctcggacagttttacagtcaggtcgctgttgttgaagagagttccccagtgatatgcattggaggtccattcaccatacgcgataaacgcagtaaacacgtaaaatgggatgattcctaagtcgacaatcgcggcgaatagcccatagctggcctgagagcctgtgggacgcctaagagcagaccggcaattatggtaagcgccatatatggtgtggagtattgcaactatgggctgcaataaaaattagcaagagaaagtcttcttgggtgggccgtactcacgccgacgcgaatgatccagatgacggtcactgcagctcccttgataacgatagagcaaaatagggacccaagggcgcccagaagactgagcactctgagtgcgagctgactcccccgtgcatacttgacccgattctttgttttgtagctcatcggtgtaaatgaactgaccgtattgaaagaaccccactacatccacatccaccattagcagaatccatcactaattaccgaaaggacacacataccgtgtcagggtgtcggttcagattcacttgggattctttttgctttggcttgtctgttggacgagtccaaatcgtcccggtcgcgtccctcgggttgaagccgcggtcggtcggacctttgaaggacggactctcataaaggaatggaggcgacgatctccccatggtagcgactaaatgccactcgtggcagccacgcgaagcagaattaaggaatgttgacgaagttgaggatgtggaatgcgactgtcaactcctgggatgtgcccaggtcacaagtatgtcgtacatccgcaaacatgcgatagtcacccggggcaaccgataagggtcacgtgccctgtatcattatctccgatcacctctgcggtttctcgaatccatgcaccatgcaattaaaacaggcctttgtatgtgctcaatgcacggtacggcttaatcgccggcctcttctacggtgccagagctttgtctctcaatttatatccaaacgctccaacagtcatgtcgcccagtctgatcgacccgtccgtgtggccatcgtgggctccggcccagcgggattctatgccgcctatcgtcttttggctaaacaggaagatgcgatagttgacatgtatgagaagctacctgtgccattcggcttggctaggtacggtgttgccccggaccatcccgaagtcaaggtgagtcacggtaaaccgcgattcaatgatgagtcggtcattgaacattgtatgtagaaataagctcatgattatatgaaaattagaattgcgaagataaatttacagaggttgctgagtccacgcgcttcaatttcgtcggtaatgtcgacatcgggcatgatctgccgctcgctgccctcaaaccacactatgatgccatcatattcgcctatggtgccacagaagacaaggagctgggaattcctggagaaaaagctttacatagtgtgcactcagcccgtgcctttgtggggtggtacaatggtcttccagagcacagagatctggatccagacctaagcggagaaaacgccgtgattgtcggacaaggcaacgttgcactagacgttgcccggattcttcttacggatgtcgaaactctccaaaaaacagatatagcagattacgccgtggaaaaactcgccacaagtcgcatcaagcgagtgcgagttgttgggcgccgcggacccctacaggtgggttacaatgaatcgactgacggtacccaggttgctaattacttgacttaggcttcctttactatcaaagagattcgtgaaatgctccagcttccagatgtatcatttgatcccattccagacgatatctttccgccggaagaggtcgtatcggcactgccccgggcgcagaagcgtctaatgcagctcttggctaaaggttcagccaatgaccctctgaaatcatcaaagtcttggtctttggatttcttacttgcacccgattctcttcactggtcacctgattatccataccatctatcccacgtgaagttctctcgcaacgaacttgatccatccgacccctacagccccagctccaaggtgtttccaaagcacttatcgagcggaaagcgtgcacaggtgaacctaccagctagcgtcttcttccgcagcgtaggctacaaatccctcccccttccagggctagaagatcttggtatcgacttcgatacccggcgcggtatcatccccaatgatggatttggccgtgtaacaagcttgtcgaacaagggccagcctgaagcgttacctgccggatctctcgtctcccacctacccggcctgtactgtgctggctgggtgaagcgaggtccaacgggtgtaattgcctcaacaatgaccgatgcatttactactgcagacaccgttgtgcaagatctctcaaaaagtgcaggctcaacgtccttgctcaatgcacccgatcacggtagcggtctaggctgggatggggtgaaaatcgaggctcagcgccgtggtttacgccccacatcgtggacagactggcagcgaatcgatgcggcggagcgagagagcggccaacgaaagggcaagcctcgggataagcttgggcgtgtagaagaaatgttgaaggtgcttgattgaacctttatgtatattatggactatctgcacagagtttgacaattctaaatacatactcagtccaagacttcgttttcccttggcattacaccgctttcgtgtactattccgtcccttcattatcacattccatagatcttgtttaacgctcagagcccgcacgcgctggcatccgcctcctcataagtggcgtcaatacgaccaagttgctccgccaggccgttggtgagcgtgttcatggcttgcaggccaatgttgaagccacttggggcggcatcgatagcaatgacgtagattgtctcgtcaatcttgtcgttcgagtagtgcaacgcgtagcatttgccgcagttagggctgttccagcccgggatggtgatcgcaccgccaatgttcgggaagcttggcagtgatgcgaagtcggtgtagccttgagtgaccaggccattaacaccgtcggagcaggagacggtgttcaaggatgatgttccaacatcatatttggggtcgtaggagacggacactgtttccgctgccgctagagtcggagcagcagcaacaaggctgagggatgccaagaaggcggaggtgaaggtgatggtggacttcatgtttatggaggatttgatggtactttgaggaagagtataatgttttgattgcttgttgtatacatttccctccctcccgacgaggtttatatatctccatccgacaggcctcccaagtaaaattgctctaggtcctctttgctggcaggccgcattcggcgcaggttttagatgaaggtctcagattcacaggtgacacagcccaaataggatgcctttatcttgtatccatcagccgatactcccgtaatagatcatcccccagaaacaggtgcaataaggccgatgtctattgtggggttctcgagggaacatgcaggcagagcctggcagactgagacacggcatatcccgggtgctattttcatacgatctgcagaaggatgacatggtcgatccacatacagctcacgcgagattctctctatgctacatacaatagggcgactgcatctgaggttgcatcataacacctcgtacggatacatagaacgaagcagcatagccacatttcattctcgtctgagtttgaatcacaatttaaaattatttcaaaagctgaactcattaaaccaaaaaaagaaaggaataggaggaaatgagggtaaagtaagtagatgaggtgaaaaggcaaaagaaaaacaatcgtccccgggaaggcttgaacttccaacctcccgattaacagtcggacgcgctaaccaattgcgccacggagacttgattgtggcagaggtcaataggaatggcattatgagcatgttttaatgcaatcgattttatagagtgtgaacagatcatagctggtacttaattaccccccttactattgacctatgagtaacgtgtgagtaacgtataagtaacggctaagtaatgtttaagtaatttctaagtaacgtacaagtaactaacgtgcaagtaatgcgtaagtaacggctaagtaacgcgtaagtaaagtctagttgagcaaccaacgtctaagtaactaacctataagtaacgcgtaagtaacgtctagttaggcaacttctaagtaacgcctaagtaacgtctaagtaatgtataatagaggcttggaattttatgaggctccggaagcttcaaaggttctttctccacataactatgcgccttaccgtgattagtcatctttatttttttttttcactttcctctttctttgcttttgttcttgaccaaaactgaacctttgaagctggtttcatagttggtaagctccgagtgattgtttctggtgctacaagaaagttaaaaccgcttaattgtgactatgtaccaccaaccgcaggcatggccacttcccatggtgatgtgccaagtaaggccgactcatggcagaccgacatatcacgattaacagcattgccatcgtaagcgattcattcattccattagcaagggatcttgctttggctcccgatactgatgtatagatatgtaaaaaaaaaaaagaagggcccgaaccgcgatttgaacgcgggacctcgcacaggttcacccgaagcacgaatcatacctaattattaattagttgagattcgcaggacagcttattgaagtggaacgtaccactagaccatccgggcgtttgtgtgctagagttgtctcttttaggaatcttgaattcctgatttttgccacgatctagtacgtcgtaatctactaggtcgtcaacatatgcttcatatttgcttgcctactgtttgcatgtttactggtttgcattacatagattgagatagctgagtgagacgttcaaggtttgcaacgtttgcaaatggccagctatatgggtcagggtcggatggtaagacggctaccaggacaaaacttgctagacgttgacctcgaaaagaggaaggacattttcccccgaatcgtaaatgtcattgtgtacctaggacaaatcaaaggattgacttctagtccgcttaccgactttcaatgggtcagttatatatatgaggattacagcgctagaacgacgttaagtctatggaagatatgaatatatatatctgcagcctcaagttcaagcatcgatctgatatcacatcacaccctcgtaatccctataatggcgatatctgccgaagatatcattcttgataaggacggacctatttgctttctcaatattctagatcctgtgcccagtttttcgaagtggccactattatatgtccatggtatgattccttccaagagcctcccgtgcaggaaggtgagagtgaaatgaacttgacggacgaagagtgacgggacatacagcttcttcctcgtgtacgccatgcaaatttaagatggattggatgtattgtgagagaagaagttgcctgggcaacctgattagaggctagttagatatatcgccatatctagcgatcaagtctctcatatcctgaagcattctacgataatgtgagctgggcggattgtccatttccacgccgatgagtgtcacttactgttctcgaagatgtcgatcttgggggaagagagccgagacatgcgtgttaaaccgtctagatatcgagttcagcgatctgatatatgaaaaagatgggattggtatacagtttatagagatcgatgcgaccttggtagtcctccactggagatgatatggggaagtgtaaatgatatgcttgaacatactcggaagcaaaccggttgcaaaccggtgcccattgtccaagttcatctattaagtttggttttagtcggttagtaaatccatgggctcaatctaatcacgacatacattcattatgagcgtagaaagagcaggcgtcaaacataatgggatttcctgtggtggcattcttcccggtatttccataccataaatcgccatgcaccagacagggcttgacagatcgaccttcactttcgaggggtcgcagcaaacgtgggatcaccttgtcaaatatgacaggactcaaaatttcgatgtcttcgctgggaccccgagctgaaatctcatgcgtcagtgcgtgtcgcattgatttagcaaagaaggtctcccagctgtccgaccactcattgtgctgtgacaggttgccgctataggtagtgacgtggaatccaaacttcccagtcggtgacatgctatcattgtgtagggccccaaggcattcagtaaactttcccacgtttggcagttcttgatttatatccttgaattcacataggaaaaaatgtgtgtcggatattgtctcatatgtaccccagccgatcggcctcggaacagaatcagggatgagattatagattgcagtcatagactcaaattcgccgtgaaccatcgctctgccactctcctctagcagaaccttcatgaagaatctccgaacagacccgtctaccaattcaacatcaatgcgccctgttgtagcccgaaagctaaagccgtgattctcagttgatatggctttggcgccatccggaagctctgtcatagtcgttattatcaggacacatttcaagtaagtcaagcaaaggatcactgatactcactagcagcgacagcggggtcaacttttgcgtacggattcccgacccctaagtcttggtttgcttgaaaactcatgactatagcaaaaggggagttattttttttctgaatcttgccgatgaatcttggatttagaggtgtgagtgaaagtttgcatgaggtttcaagaggaatcaggccggtatggtttgttcctctgtgtctcaggcaattacagcttgaggcttagcataaggtgatattgctcttaccagaaaggacccccttcctccacgacaggcaggtgacattgggcctttcttggcgacctcgtacattgttttgtttgcccgcgcgtatttacagtcacgtggtaaacattcacctaggagatataagacctacccgtccactcatcctccctaaaaattatgtagaattgatagaggaggatgaaattaccgacggagtgttccgcgttttacacaggggcgaataataccatatattctcaaggtagtcaaccgccccctttaccagccacgcgatacaggagtactatagcggtggttccttacaacgtgttctaaaggcattattcaccgcgcaaagaaaacccatatggatttgaaaccttcagatgttgttctcgacgataatgacaatgcggtcctcattgacattagcggcatcggcgaagtaacgcacgggtggcgtgctccagagatacaagatgaaatatcaccctttgaacttcctttccaaacgcgtcgattgaatgacatttgggcctgcggaaagcttttgacggaaattgcatcaaacgccgggaatagccccttcgtaggaactatgaagtgggttgcggatcatttaaccaaagaaaatgttcacagccggtggactctatctgagggaatctctcagttgaagggcgatcctaccccggagttcgacctcgtgaaccttgcgtaggataatattatgatttttttttgagtgtatacaaactgctatataggaactataatcatatctcatactccgtagagaggtgacagctatcataccaatcgagatctattgtccgctcggtaaccatgagaactgagactataagtataaattacatcttctctgagacaatcactctctttccatcatatattcttcacttcacaccattataccaaccccatttcatacccagtggccgcggtacagatatctaatgagttaatcataaatcaacttgaggatgaggtcaattaaccattttacagaaatgtcctcccaggagccacctcgtgatctagtcaccaatgagcccagagctacggcagttcctgacccggcccgccctgactcttctcaacaaactgaagcccccaaaagtactttggtggctctcaaagatgcattggtagtctctgacaggttgatcggagatatgtccttggagcgaagccgtattcgaagacacatcattcaacagcgcacagtgcttgatagccaaactgcgcacctttctgcaaccgatacccgaaccgagaagcttcagcttctttatgacagaacggtcaaattggggtcgacagccaacaactaaatggctgtcttacaacgtggctcggatattttgcaatcatagattcgatgtcattggagcgcgacggaaaaaggagcaacgcatcgtccatcacccctactacctaattccattgattggctgaggaagggatgcacgtcagcaacaacacagaaataaaattgagtcttgtcttttggtgccttgtaaatttcctcatacttacctcagtctctagtataactagttatggatcaccgctactatcttgcctaccggtgagagatgtatattgggtacctgcgtagtacaaaaatcgacatgaatttcattaagtggcacgatgaatcttagacttcagctggacctaggtaaactcagccctagcctaatctgtgttgaaggccctaaattggttataaaaaccatgtcacgctaattatgcgtacaattctgctgactttacagtttatgaacgccaagaccctaatttgggttgggcctgggtcggaggtattgatgtatgaatacttatagtcaactataactagttagggaaccttgaaatcatatgataatttgtcagcatatctgttcaaattccagtgtcgtcattcagcaagagagtagtagttacctgccagcaaatcgcccaactaaatcggcctagtgggtaaagatcagcagtgtctccccgatatctgaagtggacagccggctgcggccaatcgccccgcttatctaacgcgtggcctgcacctgggcaaccttggaaggcagcgaattttgttaacggaagattgtttcttttcttttcttctcttcttatcatttctcactgtgcgttgcttcagacctagcttggatttcactgttggctttctgcactcgctggacccggcgggattgttgtttcctcgtttcctcattgcttggcgcatacgacaccccatcaattagaccatccgcccaatatgcgcgacgattatactcaaaacgaccctggcggcttccaatcaagtcatgtgttgcacagtaagacagcagtgggcagtgcatacccgcctgcctacggagagtggagcggagaagctacaaatacatactccagatgggacccccgggaatggtccttgaagaagaagattttcctagcggccggcatcgtggtggtaatcgtggctgttgtcgttggctctgtcctaggagtgcgagccaatcggtaccccaattactcgaaactggattacagcttgaaagacgaattttcgggatcgaccttcttcgacaacttcgaatattttaccgccaccgacccaaccaatggatttgtccagtatgacctacaaaccaagcctatgccaagcagatcaactgacgtgtaattcaggtatatcgaccgagctgcatccgaatggcttaatctaacatacgcctcggacacctccgcggtgctcaaggtggacacgacatacagtggatcggaggctgctaatgggcgccaatctgtacgagtcacatctaacaatacctatgctgatgggcttttcatctttgacattatccacaccccgtacggatgtggaacatggccagccttgtggctgacagaccccagcaactggcccgagcacggagagatcgatgtagtggaagctaccaacgctggtacttttggaagccaatcgacgcttcacacgtcgaaaggctgcaccatgggcgttaaacggaaagaaagtggcactgtggataacgagaactgttactacgaggcgaatgactatgcgggctgcggcgtgaaaggcgcttcgagtacttatggtcccgagtttaacagcaatggtggcggagtaagtgatggtgtcccggactgttcatgcttccatcgaaaccaatttactaataaccacccctttcaggtctacgcgatggagctccgtgacgctggtattcgcgtctggcaatgggtccgctctaagatcccgtccgatatcacctcgggcagtcccgacccatccacctggggcaaagcacttgcggacttccccagcacggattgcaacatcggttctcatttcaagaaccagagtatcatcatcaatatctctttgtgtggtgacttggcgggcgcgaccaaatactacacgacacaaagtagttgccctggcaactgcacgacatttgtgcgggataatgcgactagtttcgacactgcgtactgggagtttggcggctttaaggtctatcaaacctcgtgaatttttgaattgcagagtgtgattcccctttaatgtgctcctgaattgatgtatgtgggtttcgatcactgccggggttttggtttgtgctttattttaagagggcggagttttcagggcagattgtgcaatcagaggagcttgagatctcatcatttaggtgatgatgaacaaactctctgtgtatttttcttcgtaatagaaggctaattagcagcaagaccaacgttatatatcttccttcgtgtctttgaagacactagagatccactgataatcattgcaccttgcctctcgagtcgacaggccagatctcctcaatgactccacctcgatgggcgtaatagaaatcgtgcaagtttacggtagggtcaatgtggctcggtaccatctcaacgcgatccccaaccgaaagcgccggggtcccttcttcccaactgagtgagccgtgctcgtcaccaagcacaccataagtgtacctcgggtccttacactccgccaagccactatccgtcgtcaacgatttcaacccgctgtcgattgtgaccgaccgaggaccttgtttgctcagaacagttgatagaatcgtaagactgttggagtagaaggtaccgacggcatttcggtaatcggtatccatgaaaataaacgatccaggctggagctcagtgacgcccggcactgtggcgcagaactccgccgttccagttcccccggtagtcaccacctcgatattgaagcctgccttccgcagcacgtccgcagtatttgtgaggatctccatagactgtagacattgactcttgcgatcttccctatcatgcaaatgctgcaaatgaccctcatacccgtggagcccgatcagtttcaaatgcttcagaccctgcacatgccgtgctagagtcatggctgggtcacccggtagaacaccagtgcgatgaagcccaacatcgagatcaatcaaaaccgagataggttcgtcgataccggccgtcgccaaagcctcgtcaatagccgttgcgccggcttcactgtcaatcactatcctgattttgcggtgtttgcggtacagttccaccagccgttgtacctttgcagggccgataatctcacacgtgataaaaaggtcgtcgaatcctgccgcggcgatgacttctgcctcgctgactttggctacgcagcctccctttgcgcccgctttgaccatcttgttggctaggatcgcgctcttggtcgtttttagatgggggcggatgtcgaggccagttggtagtagcttgtccattagctttttgatgttggcttcgacgagatcgagatctgcgatcatggatggtgtatcgagggtatcgacccggtcgccgactttgggggaatacatgttgatttcgaagtcgagggtctagatgaggttcgaagccagttatgtgctggtggtcagtgtctgggtttgaagcttgacaaggggtgtcgctttataagttggctggagaatgcaagggataaatatgtgcccgtgctgttccataatggaccccgcactaaagatgggcattcgtgcggggtaagaaaatatagattagagaagaaagtgcactaaattgatgtatcccagaggattttgtttctaaaatattcattctttacctaagcatatccagctaagttgaggcatcttctagatccatgtcctttttgtatcagcaagttaccgcataatgtcctaatcgagatgttttttatatcgactaaggtttaagctaaacattacagtaccatggatcggcttagactagtcccgattcaatcgcagctgccatccatagatctgttccgcgccgtcgactatagaactgaaatctgagaggaattggctctttgcttctactcttttatcaaacatcccctggcttttctttgacaccctgtctatgacactattgaggattcctggactaaaccttcacgcatttatcatattgtagagtaagttctgagtgagattttctgatgaattgagctagtagtacggagtagagttaagataacaaatatcattaaatgcgaaggactaagaaaataaattgtatacatgatgtagaacgagcgtcctgatactcttcgcagggctaccggttacttgaccaattcgctgcagtggccgcggtcttggatcgtaggtgtgtcagatagactaggtagtcttggtggccgttttcttaaccttcgggacgcgcacccaccagtacagtgcacatgccgcaaagatattgaagacgatgaacacccacataatgccgaagttgcgccacacatctgagtaattggatgagacagaagtaaggtacacgtttgtgtcgctgatggggcagaagttgcagtttgaggttgcgagttcgtgttcgacgtagccgcccatggtggacttgtatgcttccatgtactcgccgcaggtaccgttcagcgggtcgaagtgcaggtactcgtttgtcgcacatatgactttcgtgttagagatgccgacggacagcataccgctgacgaggtacgtaaatggcgagacgcggcacatgaaattccagaaacctgggagctgtgcgggagtagcaaggacaccgcagaataggaggcagagcatgaagagcatgttgcccgtgttaccggcattctcggcggtttcgaaagccgcgatcatgaagtgtgcaaaggtagacgagaagagaagaaaggtccagatgaagagccacatttgcgcgccgcggagcgtgacggaatcagtgggctcggcgttgcggtacataccgacagggtagtaccagcaaacgaatataatgagagacatgagcgtgttccaggggagttcaacaacaatattcgatatcatgaaagctttccaagagtaagctttagatggacgttcgcggacctcgtacaaactgcgctgggcaacgaaatgtggcatgatttgctggatgagctgaccaaagagagtcaataacataaagatagcgaacatctggttctgaagcccctgcatcgtgttgggggtattgtataaagagaaaccgacaaagagagccgagctgccgcatagtgcagtcttggagtagatgtatgtgggtgagcgccagatttgctggaatactcgggtctggacttcacagagttgttcgtagaaaggagcggcgaattcgcggtagctggccttgtcctcgcgcttacccaagacagtgtgggcagggttgacaagctgggagcgttcaaatttcagttcggtgagatgtttttggacatgtgcatgttcgggggacttgcgccatgtctcgtaccagtcgatatcagtgtggaatccaggagcggcaccgataacgtcgagcatccattccgcggggttagcggtaggagggcacgggggaccaccgttgcggacgaaatagtcaataagaatttgcgagttctcgccaatatctccatagtacacggtgcgaccaccggcctgcaggaagaggagtcgatcaaatcgctggaatagcatagcagagggttgatggatagtacacagaatagcctgaccgttctttttcagtttatcaaggagatcaaggatagcccatgatgtctgagaatcaagtccagaggtaggttcgtctaaaaagagaagtagagctggcctggcggcaagctctacaccgattgtgagtcgtttacgttgttcgacattgagaccctcaccaggtacaccaataacggcatcagcatactcggtcatttctaggagcttgataacttctgtgacatagtcgaccttctcttgacgaggaacgtgagcgggctggcgtagaagagcagagaaggtaagggcctcgcgaactgtgctggtgttcaaatgcagatcttgttgttgagcgtagccggtcttgcgctggaaggagttattgcggggtttgccatcgacaaggatctctccagtgataacacccatagtggtgcgggtagctagggcatccaatagtgtggtctttccggcaccagagacacccatcagtgcagtcaaggtacccggtttgacccatccatcaacatgatcaagaatcctgcgatggtcctttccaatcttaatatcgtagcaaacatctttccactggaagatagcagtctggcgttcgatgatggcaatgccgtccgattgggtcttcacagcaatgctgcggctactaccgccttcgacatcgtcctctgacttgctcttcttcagggccttgtgcccgcgacggaagactaggatctcgcccttcgacttcttttcggtgatgaactcggtagcaatcagatagacaaccatcagggcgaacatgaaggcaaatataatgccgatgttcctccacttgtgcgaggcggtatagccataagccgactcaatgtagtcgtcgccattgacgtagggctgcccaggcactgatccaactgtggagcaaacacggttgtgagttccgacatccgtgtagccaggacctgacgggacgtagttgacacagatgaagtcgcggttgtggaactcattgatcattagagactcaaagccatagctgatgggattgatataggcgatccagcgggcccatccaagcatgtagtgtaccggaatggtgaatccggtgtacatggcgagacccagaattagaatcgcagcgggggccagggcttgaacgagggatcttgtcaatgatgcaatggaccggaagaacatagacatcgttagagtcaggacgaatgaggtgaatacaaagaaaaagaaggcaccaggttcacgcctcaggtttgtcatgaagtagagaaccaaattgtaagtgatagcgttgaggaccttatagggcaaatccatcaacatagatgcaaatgcttcggcggacgggtggtagagggcatatcgagagtgtttctccacaattgcccgttgagcataaagagtgagcatttcaaggccggaaccaaacgcattcatgagaacagcaaagaagaggagagcaccgcgctggaagaagctgttggtatcggccttgaggttgtaaaatatactggcgatgatgagagccatgatggaatttccaattaacgaagaaactgtgatactaggatcaccttttaatcgttgaaaactgcgccataagcacaatttaacctgttgcacgtatgaaagagtgtagggtgacgatacatgctgggccttggcttgctgagctctccgagattgcttgaacttgtccaggtattcaccaccgagtgcaaactttgcattatacatctcaatgtcttgcacgagctgtgctcgttctgctgaggccttccatcttgccgcgaactcatcgggcgtccgggggacgcggtattcataccctggctgcacgacacgctcgagatggctagtcatagaagtgaggaaatcggcgtcagtttgtcggttagggcagatgaaacccatgtcaaggaagtacttcttagccgcggtcgtgcgaccaaagtagatctggcgaccttcgtaaagaacgaggaccttgtcgaagtggtcgtaggcagcctggggagcttggtaaagggaaacacaggccgtggcgccgttgatgtcagtctgcatgcgtagagtcttgcagaattcgacagcatttgcactatcaagaccacgagtggagttgtcccaacattgcagcggcgccatgctaaggcaggcttcggcaatactgacacgcttgcgctctccaccggatataccgcggatgaagtcgtttcccacgatggtatttttggtgtgactgataccgaagatggccataatgacgtctcgcatatgcgtggcatactggttcacagttgctcctccgggaatgtggcgtggcgctcgggcccgggcagcaaagaagagagtgtctccaaccgtgagcttagggaagtggacgtcgacctcagcggtgtagatggcttctcccctaaactcggtggacatttgctttgcgctcacacctgacgactattagcaggaagccttcacgtggatgacgtcggacgtaccttggaaattgatcttcgagttcttgtcgacaaaaaagccgtgtgtctctccagcgatggtcttcaagaaagtcgagcatcccgatccaggtggtccaagaaccacaagcatctctccagcctccaccaagccatccaagctctgcagaatttcgattttgcgttgatgttggcctgtgaccttcctcgccagactgaaagtctctaaccagacgttgccaacgctcttctgataatcggtatcggaaccgaaaccgtgcacattcaggttgctgaaggctatacccagtgtccggagtggatgcgcttgtttgtcctcggtctgcatctgtagcatggccgtgcaccaagcccgggcatggaagtgttccccattggggtccagggtcgatccaggctccgctgaaaaggggttctcgccagtcgttgaaaacgttttctgctctgtgaattctctggccagttggtgaacctcggcctccctcttctccacactggggacgtcgtccttcacactttcggtctcgcggtcgccattggccacgaatttgcccaagctcatgtttgcgggtgttctggttcgacaccaataagcgtcaatcgaatatatcgactatagtaaagaaagaaggactgaagtttcggtatcaattgctaggagcagaagattcatatataaagctgcacattgccctaggcattcttcgctctcagtttggactgaaggcatggataacgtgatccacgcaaacaaggcctggaggcgttttgcgaacatttttggtccgtgtcatgcaaacaaaggtttacctcagccaagatcgatggctcacatcagccacctgggcagatcaatgggtcacgtcagccaaaccaatcaaagatcacatcagccagaacaatctcggccccggggaagcgctattggccacatccacattgatctagtttagatttaaagccaaagcgggattgagccgtttcgggccagggatcgacgtaaccctgtccagccctagagtggtctggtctgcccacccacccaccttgctcttgcttctggcattgccgtggatttcgagcttttatcgcaaggaaacctagatcccatctacttcctacaccccgcaattccgtattcagccagagatcgaagcagcaatggtgaacctccaaaccattcaagcccataatgcgactctcaaatcactagccccaggtctcgtcgcggtgttcggtaagttcaacctgctccaacattttagtctttacgatgctcccgaagcaaatagcccgatccaaaggctctgctctaccccattccctctcttgggaattccatctcactaataccctccagtcggcggcacctccggcatctccctctccacggccctcgccttggctcgtcacaccctctctcccaaaatctacctcatcggccgcagccagtccgccgccgacgacgccatcgcctccatgaagaccataaacccctccgcccaaccgacctttctccagaccgacatatccctcctcaaaaacgtcgacagcgtgtgcgacgagatcgcagctaaagaaaacaagctaaacctgctctttatgacaccagggtatatgacgctgaaaggccgggatgagacggcggaaggcttggaccgcaaattcgtgctgcattactacgcacggatgcgattcgtcaccaagttgctccccctcttgaccgcagccgcagaagacccatctgtcaacgccaacgccagactatcccgcgtagtctccgtcctagacccacaggtctccgtccgcgccggcggctcaggtaggctcgacttctcagacctcagtctcaagcacacctttagcctccagacgtgccaagcgcacgccagcctaatgggcgattttttcctagagggaatggcgcagcgacacccgcatactagctttgtccacgcgtacccctctggcgtggccacaggtctgatgcgtgaactgccggttggacgcgtgctgtcgtctgtgctagggacgctgttgagtccatttatagttccgattcaggagagtggggagaggcatttgtttgcggcaacgagtgggagatttccaccgaaagccgagggggcgaagatggagggggatgtcgcggttggcagtgatgggacgaaggggagtggttgttactgggtgaattgggacggggaggtgttcccggcgaacaagaaattagggaggacgaggggggagggcgcggtggagaaggtgttgcagcataccgacgacgcgtttaagcaggtgtgcgaggatggcaagacatacgtgtgaaatgtcatcgagggaagaagtacggagtaatagacgaagaaatagacgtgtgatacctaggtagggcggagtggtcaaataccgggcttattcatcaattttctcatttatacggtattggtgttgtaacagcgtatttgtatagatcgagaggcatgcggctgccgaccttgaagaagtcggtgcgttcagggcccaggaagactggcgccgcttggttggcccctagagaatcctttcaggggtggcttgggcccacagtttagtttcataactgtcgcagtaccggaatgtctcccggttggagattaccagttatgcgcttgaatttggtttcatccatgacggtaagtgctcgttgtctctggtatgtgggatatcccgaatgagtctaattcactgcagatatcatcgataaagaaatccaagacgcaaacctggaggaggtagagcaggccttggaaaaaggcggacagactagcaagatcgaagagaaaggtggctcctctggaaagcgtagaatcgttgcccagattctccgcgagatgatggcaatcgaccccgagagagcaacggttgtcaccaagagctgggccgctggtgttcaacattcgagtacccggcaggatgacaagcaattcaatactctcgaggagtacatcccgtacaggtgctttgatgtgggatacgggtaagtctcctgcacccaccaacgaccttagcatcctaggtcaaacctctatccgatactaattttatcctgctatcaaggctctggcacggccttgtcgcgttgagctgcgctattaccatccccgaggaagaggccgatgaggcgagggagcttctcatgcctgctggaaattctagcctgcataagtgcatatgcatggtatgcagtttatttccttatactatgaggttccacggggtcgagattcttagtgagcgccgccacccttgtattattgcgggcttggttgttgtcaattgtccgcatttctacttaatgtagccgctatcaataagctgatggccctggtcgtgccgtaaaagtctgtatgctcggtctggtatgctgatatcacgcgccgccagcctgaagcctatcaacgacccgaaattatatttctaattatatttctagctgtggacttatttccggcgtgtcttcccctctggtactgcgccaccactcactttgccgcacaagttctccatcttcaccacctagcagagtccaatactttttcaaaaaccacacccttgcctcccagctgcggacgtcccacggcgtacctgtcgaaacatatccagtggagttatttcgatccttcttcccaatgcctgcacctccccagcatactaaaccgttcagcatgtcgtggaagaagttatcctcgtcaacctcttcctgatgggcgatgagaccttttcgtagtgtcgggaaaggtagaatatctatgtatggatgatgcttgacagtgatttgttcgctgctcggcctcaagtccggcttcagtgtcttgaatgttctcttcactgtgcaaatcatatttgctttggccatatcatccgctgactccgtgctagactggaagaatggcgagagagattcttcggcacagagcgtctcctcggtaatgccaacatgtattccaagagtactcagtgcagctatagtgcagactgtttcgatgcgaaggttgttggcatatggatctgctgcaggtgcactcgatccgaatctgagtatcctaacctccccacagctgaaggggcctgctggaccttctgtccatatctggaagtgtgggctggagcagccgcagtcgatgttggtcgtccagtatagaccaagggcgtcattttgtttatcacaaatgagaagagaaggatcaacatgtgttgtagaatcccatacgctcagtgacggtggtgtgccgtctgactgcgaaacatgcgttggagaatcccatatactcagtgatgatggggaggtatctgcctgtggacaatatgttgtaaagtcccatacactcggtgctgatagggtgtcatttgactgtggagtaaagtattggcattctctcgaagtcgccgtagatggactggaagtagatatatcccaagtatcataagctgggaggctctttgcaatatgggttggagcagtggttgagctaatcgttgcgaccgcctcggatgggcctgtacccgcagctggtgttctttcagtagcacggcccggcgtagcagatgctgcaagtgcttcgagactctctaggcgctcacgaaacttttctcctagacgaaggattagtattcctttttctggggatccctgtacccatgatccgtatgttgccggcatgcctatgccagagaagacctgtactcacggtactttctttgtgcttgagcgttctgctgccgtctcttctctgggtcacggcggacaggcttccgtttcgcctttcccacgctatcactctgcagtgttccttctcgagtctgaaatggcatcgtgtaaaatgttgggaagatgtcaaagatgtggctagaaccgttgcggcacagctgctgtggggaccatggctgacgtgagccacatattttcgcccggctccacgattggctcttcttaagtactgccccactttatttgtcccacagagatcggagcagccgaagctatgcctaacatagtaatattgatgccttagaatcctgctggaccccagaatgcaggattttgacagtgctcttccaaatccgtctacttctatgctttacatcctgaatattgagatcaaagatcccgaaattagttggaaggatattttagaagcgtcttaattgcctatattaatctcatattttttattgattttatatggttaatgaaaagtatatgaaggtgacggtcctcctctggagactgggacttcatcatttggagatggttcttaccctcaagggcgacttttaggtcatgtgacgcgtaacaactattgatcctatcaggctaagcccagttgggaaaccggaaaacatcggcaaatgggaattctggtttactcgtgaaaaagaaaggagcggtctcttgatatggctaagaattggcaagaaagcaggttaccggaataaggtattttcgaggcatttttgattgagtcaatgtctgtcagctatccaacgtggagcgatggaagtcggttgatgccctttcaagcgtatctgaggtggttctcaaaaatttgggaagtgaggttaccatcaaagatagttgatatcaatggttaagtcatagctaggtgagagtatatatatgatttatgtgtgatttccggtgaagggacagcccaatagatttctcttaacctaggatctgccatcccttgtagtgcaatgaagaaaaagcattgtcgcagtgttgcactgagtgcctgcccaccatgaaacgcctcatcgtacctaatcactggtgaatattcaagaccagtgacttccaacatctacttcccggacaaaaattgtctcatcgtatgttgtcaggaacgcatacttgaggtccagctcacgcatttgaccggctaattgccctgtccgttatatgaatgttagccttagaacgtatcgagcttgggggattaagtgataacacgaacctaggtagcgcctctcttcgccgtccccgaaagtaagaatagccgtagccagtatgttcacactcagacaatcccacggcgtctttgcctctccgatgaccttgatggctttgtatgaatcaaggataatgaagtccggaacacctctgaaggctgttgctagggttgtctttgttgggacgctcagggagtggagagagagaagacttttgcagttggaggtaatagtagtaagatactgctgggatagtgattttattaatggtataacgggatctgaaggcgatttgatataaggcgagagtataaggggatccggggacgatacaatagccaacacctgctctgtagctgcacgttgtctagaacgctctctctttttggcatcccgataagattgatactgatcggtctctcggttgctggcgcgtgagcaaaatagctctaaaggatgcgagtgaccgcatctagtatatattttgaaagctacaatgatagagaaagtagatgcttagacagagatatgctctgcttatatgctctttgtctgaaagaaaaactagatgctttatctgacatatctgctctgcctgtatgctcaatgcctgaatgatcattatgcacccatagagatcatggtcacatgacacatacctaagatgctcctctttactccccaatcaaacaggacaaacagggcattcaacagcctcatttcccacaattgtgataaatctgcctatggatcgacaagccacagaaaattggagacgagtttcatcttttacctgcaagtcaaatagtcatcatagattctgctcgtaaaaggagcctttgatatgggaatgtacagagtcttcctgtcaacctcggcagttaccaccggctccactcacacggacgtctggactccacaaccggccccgccacgaagggaccgaatccccacaaggacaacgccatggaaatcggaccggaaccgaacaagaagaggctagctctgagtcggtgtcggaagataaatagatggaaatggtggtgtgatgagttgagaaggggctagaatggcagggaataagttttattcaaaccttatggaagaactttttacgctattcgtaggtgaaaggctaggctgagcagtcgatgggctagtcatgcgaataaaatgagcgacatggttagttttttatcgcagaggaatatagggctggcgtccaagcacaactagacagagcattactatctgtattgatgcaacgagattgaggccacagagggcgaatatctcgcttacatcggttggtccgttatagctaggtttgctagtcgaatagtttgtttatttattatctcaccgaggttgggctactgtcatgagtcacaagccaagatacaaattatggttcaatggcttactgatgataagaaattaatttattgaagctagaggaccgcgaataaaaggtgtagaggaaaaaaaacccggatcagattagaataatctatggtatgtggtgttcgggcgtggttgcttttggttggttcgctttcagacattcactagattcagctgagaggactatccagatagacgagttggttgtacattgaatttgatcaatttgaagaattaacctcggctttggcttagcaggatgaaatactatacaacacgcatccatcgttgatttttggcatcatgtacgaataggaaatataacaagctgaaccaagtatgattagatatagaactttgaaagccatataaacataagaacgttaatcattactgggactaacacatgaacagccgcacacttcccctctcgcacctattatttagaagacagccccatcccaaatcaccgaattttgcgtagcccaatcggaacattatcgtcgactttattttgaggtgcgtcatcattccagtccacattccgggtggaagccttttgccggaagaagcgatacttctgcaaaagccttctatagaagaagagtaaggcaactccaataaccaatccagccacagagccaacgacaatacccgcaatagctcctcctgaaagaccagagcttttttcactcgtggtagccgagttcttcgttgtgcccgacgccgcagtagcagtagacccagatgcagcggtcgtggtagtagtcacatcggtgaactcatcacttgtcacattgaagcaagggacctggtaggtgaatttgctcgcagcgacgtatgtgatgtctgcacacgcgtagtaggtttcgtttttgtcggtatcaaaatccgaggtgtatttgatctggaaggtggcgttcgttccctcttctatgtcgatcgatgggttggggacggagtagcattcgtgtcccggcttaatgtcgctaagagtagagccattaatgaagggctcaaagtcatcattggtacttgggtctaagggaaggtcagtctggatagataggattgatgaagttagcttactgctcttgtgagagatagcaacctgcattttccatgactcgtcttggagtacaagtgcgagcttgccgttgactacaatgtcttgtcagtatgtccctttttgtggatagtgaggctcttactaagtgggaagttcgttcggttcacgggtcctgttgatgagccgcatggggcgttgttgtcatacgctgcaccccagagacgatcgggtggccacaggaaggcagccgggcccatctctttgctcgctgcgtcgccatgggcacacaacccaaccgcggagaaagcgagtagtgcgaggtagctcttcattataccgagagggtatgctagcagaaatatatttgtagaaaagaatcttgaagggaaacacggaaaaacgagacatcgccgtttataaacatccagtcatcctcgactgcatgacaatctagagtagatgagtatcggcttgggccgactccgctgccacgaggttgacaaattgccaagtgtaccaagtgcttggcaaccatagtttcctgcaagttacgtccgggaatcttctcaccggagttggaccactgatatggatccattcaggccgagtcacaagccaaaagccacaagccaagatacaacttacggttcgatggcttgcatatgataagaaattaatttattgaagttcgaggagcccgccggataaaaggtctagcggaaaaatcatacctacgacccggatctgattagattaatcagataagatgggtgggtcttctccggctaatttggctgattttcggagctcgcttacacatactctcaggatggcctgggttcatttgagacattgctctaacgggtattctcagccggaatagctcttggttctccgagcgtacgtaccactagatagttctcgctccgaaaagaccattctgccaagcatcgtatcgttcttggggggacatccgcaggtaaataagtagacactgaactgccgtcacttgaggtatacatcttctgtctctacaattccaaatacaaacttcatacctcatttcactcgttgatatcatcatgcgtcttgttaacctcgctgctcttgcctgcgctgtgatcagtgccagcgcattcgacttcccggaatttgtccctctgcaccggcgtcaggaggccggcactccagcatatgagtgccacgccaactgcggtatgttccatatcctctatgcaaatcatgactcggactaacaggatcaggcggcgtgattgtcgatggccgtactgacgggtactgtgataccgatgaattcacgaccgagttggccgcttgcttggaatgtgcccttgagtatgacatttggcaatactacggaacctccgtgtcaaaggccgctactgcttgtggattggacgctaccccggtcgaagcatcttctaccactacatcggctagtgcaaccactgcatcggatagtgagaccactacatccgacagtgctagcgctactgagactgcggagagtgtcacttccgctgagagcactgctgcggcgaccacctctgctagtacttcgatcgcgacaacttccgtgagccccccgcgtgtttctggttctcctcgcccgtcgtcattgattccttcggccacacccactggaagctcggttggtttctcttctactcaactatggacttatagctaacttgacacagactgcttctagcactccttcctcgacccccgtctacactggtggtgctacgattaatatgggcagcggactggtgtctggtgctgttgtcggttgtctccttgcagctttcctgtaaatagtggtggtgtatagtaatacttgatggagcgaaggaaggtgtgagaaagattggtggatgctgtatattcaattctctcttgtgacaggccttgaacctgtctactgcactattgcagcaagaatcctttattaagactcgaaattaacgttctaatctaagagtctcagattgtaagcagtattttcttgaaaaaatagtcccaaacttgaagcaccgacatcaaacatacgatcaaatcccagaatgactaagacgagcgactgaaaatcatcatgatacgtaatataccactaactgcgacgatgtaaccaactcgcgacttttttagaagtccccaattcgtttttttgactaagtttggtattgatataaccttcccagtatacttaggtacacatcgttcatcctgcgagctaactaataccgatggaccgttatgaattcatctcatcactcttcccatctagtgagttaaggtctgtttccaaatctaacccacagccaaattgaactgccctttaccttcagtaacttcgaactgccacgacttcccatcatacttctgtctctttttcacggtcacggggaacattccctcaaccggacacatgttggatatggttgccgaatttactttcggtggcgcattccagagcctatcgaccgaagtaacatcgtatcgtaaggcagtcatggctactagtgccaagatctcactagtggcaaagtggcgccctgggcagattgagggagaaacaccgaatgccataaacgcgccggtgcgccggggctcctttttcttgccaccattattcccggttgttgtagtggatctcatgaaccttcgttcgttgaactcgtcagccgaatttccccaagcgctctgatctcggcccaattccttcactggcatgaagagcatggttccagaacggagaaaatatttgtccgcgaggacaacatcctgtgtcacgaaccggacggccaccattgttgaccttgtccggaggacttcttggtacaccgagaggagaagtgggcaatcgcgaaagtaccgcacataaatgatatgcgtaccgtcgggtgcggtcttgagggtgttctgctctacctcttcgcgtatctcttcgagcaattgtggtctcgagaaaagctcaaagtgaacccagaatgcagcaggaacggtatttgccagtaatcctacaatcaggggcatttccgcgtatgctatttcttcatgagtaagtccagcccccaggaatgacctatatcgcatggctactagctccgagccgtcttcatgactgccaaggtcgaaataagttttgaacgcagcacacaaagtcttgcgtgccttccaggtcttaggggcaagtatccatggcaaaatgctggacagtagtagggccacattacgttcgaattccctgcccgggtatttgaaaggttttgtagcaagttataggtaggataaactcaccagaatgtgtcttcaatgtgtctaatttttgaatggattcgaatttccatatgttgcatttgtgctgacactagtaatggtatgccgaagccaagcattcaaatcaacagtctcatagttgcccatgtcatcaatgatgggaagtaggtactgaagcattatcctgttaattctgtcaagggatctccccgcaaggacgggtccagtatcatgcacaattttagaaaggatgctcgaaccatagctttgatcacataaatggaccagcttattgcgcggagtttgacatagctgcttctgtgtgaacttcactaacggttccaacgtaatggccgttgggtgtttttgagcagcacgcatgatggcaggtgatgaagtcaaaaagagcctgaaggaaaatatattaaccccgaatattggttgatcgcgatatttttcgctgtcgaatatgctgggttagttcaaactgtacaaataatatgatcgatgactcaccacaacatgctaagatatcctgagccatgttggatgaggccaatcagatggcccacaagcggaatcgtactcgataccgagggaggctcgcgcctttgaccgtgaaacgaagtatacgatgaggatagaaccacaaccaatactacaccgataatcgccagatcatcaaagtctaacatggccaagttagttcacgatgtttgagtgaagcagagtttagggaattgtcggtgagaggtaagtgaggcaagaagcagcgctgagagtttgtgattgcccacgtcaaggccttggagtctcccaaagaggtagttgctgaccagacgacgtttcataaaataggaaaagtacatgttttcaactgagattggctaaccctcccgtcgatcgaccttcattaatttcgtgccttatacattctatttgatgctattacttagataaagttgcgtctggtaagtttatttgtactaccagtccacataaatcaccaagacgtcccagtcctctaggaaattctatgctaatgcgcatgtttagagaatcagatttgaaatggtttgttaaccaaagtgaggctaacagtacgatcggagagtgacgtggcacaccgtgacacgcatgagatagtagcccccactccctcgtttcgaacgtttggtaaaaggatagtttcagaatatatcggcgtggtagttatttttgctttggcataacaaagttatcgttgaatttgactactgagcttgtacgtcaacgccaggggtcatagatgcaagtatatctgcgagtcccgcatatcaccttgatcaaaaatctctttggccacttctcttgccttaataataataatgcaaaatgtttgctttctaggaggcgaatcatatctcaagttatcaattatctctgacgtttcatgcggtagacattgcaaatagtacagcgcatattgccactggaccataacaaagaccaaggttcccatttagggtccacaggggtcatgactgttgtctccacattaccccgcctagactaagtcagatagataaagaagataaagaccaggttgatttgactctttccttcaaagtctcttcgcagagatatttgatcaattatacattctcaatatggggggagagaccctacaagtgaagcgttcccttctgtgggagagggctctgaagaactatcatcaagatcttgccggtgataaggaattggtcaagatactcaagactagcagcctcgaggagcttcttgcggatatccccattctacggccagttaactcgtcggaaaggccactgccctgcactatggatcgactggagccaacattcaaactgttgaatgatttcttagagatactaagaaagtcatgcggcgcggagtcggcgcaaacagcgctagtatggggcagtatacgaatgattgtcacggtgggcttccttcatgagagcctacacactcttatttgaggctgactagtgtgcagctggcatctaccacagacgaaattttgcaagaagtcttcgatatgattgaagagctggccttgacaataccacatctggagtcctgcaaaatcactgtctcaatgaccacggatatggagacggcactgttgagtctttaccaagagtttatctgtttctatgcccgcactatccgtttctttcggaatttcagacaacgtaagtattgcgttctcagactcaatccggtcttcgtactaatttgagccagcgtttatgatgcgcagctcatggcccaccctccagggcgattttcaacgaacgatccaacgagttaagcgcctatctaacaatatcgagcgcgagattgagctcagtagaatgcgactcgataaccagaaataccatgtggtcctcgatttcatggcgaggttcaaatcccagtttccgaaaaatggcgatcaagtttcccaccatcttcctttcgtggaatgctcccatttctatggtagagatgatattctttgccaaatagatgaagcgctatttgtgcaaccctctgcccgctcacttcgatccttcgcgttatatggcatgggaggagtcggaaagacacagatcgcattgaagtacgccaacgcatcgcgtgaaaagttcgataatattttctggatttcagcccagaattcgataacaattgggcaaagctttcgaaatatttcaaaggtactcggtttgattgaactagacacagagctggacgaccatgccaccattctcaaagtcaaggactggctatcatccgcaagtaagctacggacacccagccctgatgggccaaaatattgaaaactaacgaacaaaaatatagagaccagctggctccttatatacgacaaccttaatgacttgagcttgatcaagcatgcttggccggcaggatatggagggtccgtcctagttaccagtcgagactcaagtgcggccttgtatcccgcctcgtcgggatgtcaagtacacgctttcgatacggataatgggaccgccgcattgctccacctactcggattggactcggagtctacatcttatcaagccgaagctaagctaatcacttcagagcttggaggtctgcctctggcgctgagccagattggcggatttatcgcccaacggcaaatgtccctgaagagttttctcggcttctacgaccgaaattcaactactgtcgatgctgagcgtccagaaagtatggattgcagtcaaacacttgcaagtgtgtgggaaatggcgctgagcggcctttcccggaatgctaaggtcctgatcatgattctatcattcctagacctcaatggtataaatgagacagatctgagaaacggcacggttctagcaaatgacgcagccgtgaggttcatgatggatgagatagagtatgtacgtggaatcctcatggataacactactaaccttaccgttagctttttagatgcccagagagacctcctccaaaggtctctcatagacaagtccagcgaaagtggagttatttccatgcatcgggttgttcagcgtgtcgtcatccgtcgaatgagcgacgaagagcgagacaaaacctttttgctcgctatagccatcgtttccgcaaacttcccagatacatacagcgcagatatcggtcaccagattgcatcctggaacgattgcaagaagaacctgacccacattgagagcattgtgagcaaagggactgagttcaagatctttgaaggggagaatcaaccgtttgcggaacttctgctccgctgttcctggtatgtttcaatattataatctcaaacattaattctctaaccaaagacaggtatctgtatgagacggagaattacagtctcgctcgttcgtatgtcgacatcgctctgcagaaatttgtggacaaagattctcttgcgtatgccagtgcagtggatcttggaggtttaatcgatgttgacatttgccatccatcggccgcgctggaggccttcgaaaaagcatacgcactacgcacatcaattcttccgagcgatgacttgtttctggctgccagccaggtcaatttaggacttgctctcactgagattggcgagtttgaaaaggctctcggctatctccaacagtcaatcgatatccggctcatgcacaacagtgacaggattggtaactcttacagtaacttggccagtttactgttgagaatgggaaagcccgacgatgccgaagctatactgaagagctgcccatcattgaaggacttttcagatgagacatttctccaaaccgggaatcctaggttctccgggtaagttctcctgtgaaggcccgaaatatatgactaacatcatgcagagatatggtattactgagcaggataaggaacgcccaagggcttcatgacgaggcactcaagtttgcatgcaaggccttagatttccgaagggaatgctccaaggagcggctcaaagtctgtgactcgctttatcaagtgtcggttcttcggcacaaaataggcgagttggagcttgctcagtaagtacaagccaatacacagcaaatgactataaatgctgacatatttcctcagacaactacttcaagagtgtatcatgatatctgaagcccttccccacgccgagggcctaggacatctcgcacgggcaagctacaagatatcgcaagttctggcagaccttggaaaacccgaggaaagtacattttatcttgagaaggcgatcgatatacgaggagagttcatgaagttggatggagactacgttgttgtgaacggaggtgcctcggatttcgaacgtctggtcccctggatgctgtggtgatctacatccgagtccaaatatgtatgcatgtcacccatgactcgaatagcgaggaatattcagaggggctggatcccacaacagatattctagcttgccgtgaattttacaaattgatcatctttgttgttcaaacttaggactttcaaaatatcatgtgacatgggactattaaggtgcgttggagggtgttcattctgggaaggcacgtgggtttggggtataaaaggacccctccccccaactcttcttctcttcttcttctcttcttcccatctctctgaccaccatctcaccgtagcccccacgagacagcgtaggcagagggtcccgtagcacatgctgcttcacctaccacgaggacatcaacattacaatgttgtggaagtccatgtaggtcagcaccacacatcaaaccgagctttctcgtggatgttcctgaagtcgtggctctcattgccacttgacgagtcctacggaatacatgaggggtgtaaatcttcgtagccgaagacgcgtaggtttgatttaattgtaagcacactggtcaccagagtagtcatggcaacggcaacccatttccacggtcttgttaagctgaccagcgaagctaggcgattgtcagtgacccaaatcaagaaaagcatcacgacatctgaagtcacaggtttgctccgacaattatgagatttgacgatagctggatggagaagccagttaaccatcgcttcttttcagtcctgggttgcatcaaaattgtatggccccaagcaccaacgcgagatgctgagattttgacaacgtctcggacgccgtccatgctctccctcagcttcgacgcctattttcgctctaatatattaacacaatatacaagccaagccatcaagccccctgactcgatctatacaacctgttcctcgagcgcagcctgctccgccaatgcttttaaagatctcttctctttttcaatcccattccgtcgctgagccgtgtcacacagttccagattcccacattcacattccccatccctgagccaccgataagtgatactccaccgtttcccgcgcggcctcatcgtcccatccgggaggggatcattttttcgcttcctaataccatgcgtccaatgtagcctcgagtcgccgctcatctgcatcatgctccgcggggtcaagtcgacctcgatgcgttcctcgccccggcggaatatcatcatcgccggtgcaccaagagataatgcgtagagctggtcatacggtccgtgtgcatctacatggggcgggatgcccgcgcctggaggatagtactgcagacagacctggtctggaggtcgctcctcagtttttgggatgagaggtttgagccactctgggaattccttgtatggaatctccgggtctatcccgaaagttttatagtcgaaggtgtagccgtagtggagtgatatccggccagggcggtcgggccattctagctcgttggcaaacaacgagatgagtcgttgctcgtgctcggcattgacaaagtcttcttgccagaaaatgccgtagggttcggtgggcaactcgcggaaattattccgatcttccatagccctttttgatcctgtcggaccttgaaggtgggaataaagtgcgtggaacctttctttgcacgtgtaattttcaaactctgattttggaatgtattaattaccggtatcaataccacacactgcatagactccaagcataatcttggaaattgtccaccataaagtgttttgagctgtattgaaaaattaccgaatccgccaagagcatcaacattggagaggtacttgtttgggattttcgacatacttgaattgaattcaatctagtatcgaagagtgttctcgatcatccggctttggccttgtatctccacagggaacgtcgattccggtaaaaggacaatgaggcaatccataagagcatcgacaaccaagaaattccttatttcagcccaatgtcccggcttaagcactccaaaattcgccaccagtccccctgaccctatactgcgactccctgctccaatcgacagagggaagaatagggcccggtagcgaggggacttctgaagggcgattctcccggtaactcgacatatcttgtagcgaaatccctggaatttgttaaccttcaggcgcgtcctactccattagggtatccactcacgtgaatacggttcaagccgacttgagacaaaaatgggtgtgctttcgcgtggcgatcgtcgtcgacgcatctgaaaagattctccatctccatctccatttgtatgcatgagaatgcccacgctgacaattccttcaacctcagaactgcctcctcatcgtgtattgcctgagacatcgttgtcgtccgagaatgagtgttgtaaaaggggccgagatatccagttgttcctttttgaaggtagaagatagttgtatagcatgggtgattattattaccgttataactgtagcgcttaacctgcgggttgaagataggtgtaggtagtgatgattgagatgagtaaagggaaagggaagagtaactaatttgcaatgaaattgaatccaagtactgctttttctttgtctgtactcgcatcatatacaagcaaaggccatgtattgacccgtgtctatccccggaaatttccgccttcttgtagcatgcggcatatccccgcctaatattatccatagtatactacttagtatctctaactcacttgttattggctccaacgaaccttcaaattggactgccaggcttcctgtggcaattaacatctatatgagacattgtaattcaggccagtctattctgaaattgactgcattaagagtcagagtgatttttcctcctccatagcaaacgccaacctgcccttactatgattctatcgtgattcaggaattgaaaagctcgaataattgatacatctccatattcatatactccgacccaacgagggacatctattcatatcaccatccaccaataaataggggcttcttgctggtttgaatggcgtcaatgcagccctgatatcgtttctttgtaatcatgcagagagccagaaatgaagctggtggcctgaggccagacaagctcctttgtttctgacggcacctacaccctcttctcctcacctcctcatctcctcttctcctcttctcaccttctcatcttctgctcttgtccatcaccagacaaaaatccagagttctctttccaatcttttccgcctctataattacatatatcattatcttgtcgatgaggttagctggcacatcttgctattcgctgaatgacggcccaaacggttagcctggtgagtctaccaaatgctagagtccttgatggatgcaaatctgataagaatgctgaacagtgtgcccctcaattatcgggctgttggggatgcatatgatggggccggcattttgatctgcgctagcgaggcgctgaacggggtaatcaggagccctccccggaggtctgccttctcctcctccgtatacgagacttctttacctcgaccatgagacctcttcccatcgaacttccatccgttactctttttgcgacctttgctttattttcgacggtcagctccttcctcgaaaaccacgcacaagtgatgtcgatccttcttcacttcacaacaagtggcgtcaacagtagccaccctcctatggctgggcctgttgcctccactgatcgccctacaactttcctccctcattggcgttgtcgtcagcgaccttgattcgatggcgaaaggtcgtcaaaccacagcagccatccaaagtattccgctacaatgccttctgcactacgaccgccaaacaaagcatattgaagcaacgaacaagtacggctaatgggcggtgatttacccgaggaggtattcttttcatcagtctcctagcacttcgcaagcaaggaagcaacatcttcagcatcaccgaggccaagaagggatctcggtacaaaggattggagaaaatcatgatacaggagacacgccagagaaaatcctttttttttgtgatatatgtaattatctatatttttcctgcaccggtcaacgaatcaggcatgggaacgttgcctatcatgacaaaaccaagaacggggtcataaagtgcccaaaaatgaagctgcacggtcttttgcacttgaaagaaccattttgagatcgaaatcattctctgctcctttcactgagcatttgagggggagattgagattcaccgtcgctcctaccgacagatagattgtcaacagtctgatgggctctcagcatagggcatgagtctcttctttgcctcccaaagtgagcagatttcgcaatatatctccgcgtggcagtgggcaactcatactaactctaccttgatatacagctagaataaacggccataacacatatccgcgcaaaggagatccttcaagccccctctacattcaatgtgggatcgtctaggaaagcttcttttgtaactcaccctctagggcatgtcgggagctcaagttcgctttcaacaagccatttggcaggtacttggaggccgtgaatctgtattccgccgactctggatgctgtatcatgtcttgacttgggtgcaagaagcgcttaagctcccgatatactttacaggtaggattgcgcatgaagtttccctggacgatctcttattcaacgtagggtgttgtggccttttttttttctataaccatgctattgtcatagccttgggtggcaggctctattgttgggtcgtcacccggtgggtgcagatcccactactagttagagtagctagttccgttcctcctcttctatcctcttctctctgtccattaccacttcaccagaatctcccttcttgtctttctcagacgagttcacctagaagtagatctctatcatatatcctgcaagttagtttattatcataaatttcaattgaaacaacggaaagctaccatcaaatggaactattgacagagcgtagttgaaagaatagcagagaaacagaatgaactagccaaacaaacctaacctaggatgtcatcaaaaactggctccagtctagcaagtgatgtcttgtacaatctgggtagaccagtatcctcaaacgtgaccgagctctgggccatatccgcaacagccctaccggacaagaatgccacaggcataccatggccattgaatcccgccgcgataaactgacccggtttaccgggaatactgccaacatgaggcaacgagtctgcactgtaccccatgactataagtgagatgaaggttagtagaaagaaaataagccatcgtatataaaagaatcgcacataccaccagcccagatatgtttgatctccgccctactatcctcccacccaaggaacgtgcgttgcatgtacccatcaaagtaatccgccgcaaccttaatcaacttcccatcatcggggttgttataccactcctcgcgatcatctttgaaaagatgcgacgccccgccgacaatgagcgacccgtcattccgggaaatctgataaatatatccctccggaccgattcggatacaatacgtaccaggcaattcctggtgaggcgcaccaggtgccgcagcgatctggctgcagatccccttgcagggaatgatagctttggaatactccggggctaaggcgctggtaaacgcgttggtcgcgaggataatcttgcgggcgttaatgacgccacgactggtagttaccggccaggatccatctgcgtttggcgtctctccgatttcagataccggtgtattggtctgcaagttcaggccgtgagaaacggcgatgcgaataagatgggaaacgagtttgtaaggccaaagatggcctgttgggaaactgaagcctcccttggcatctcggacatgcgctatcttaacgcagatatcgtcagaaataatgagagcggaaatggtagcctgaaagcccatatcgacttacatcctgggtctctgcttgagacaagtatttaacatcattcataaagtccagtccttggtcaaccagaaagtcgtagaaggctttcgccttcttaagctggtcttcatcaagatacatatcataagagcgggtaaaagtgagttcgcaatcaatgttctctttacggaccagctcttccataatcttcaagtgcgagatttcgaaccgcacgatctctgctgctgcttcgatgccatagcgttcggtgaacaaggccgttgctgaatagatatctggtctcaaatggccgcctatgcaaaaattgagtgagctggacttatatacataactcatactatgcgttatgtgtgggtcttaccattgcgcccggtggcaccggagcaaagttcccgagcctcaaccaacaccacgcgaggagctggattttgcgggttctctgcaagcaagcgataagcagccgaggctccgacatagccgccgccgataattaggatatcggcttcttttggtagttctgttgtagtttggtggttgtcgagtggatctggttgtgtccgccaaaatgattgggtataccccgctgctgggcgagggaagcatttttcgttggagttggatgacatgatgcctagatgtccgtagtttacgatgcgattcgaactccagggatatgcaaatgtgaatacaagtgcaatgcgaaaacaagaaaagtgggcgtccacgggtggtatagcaaagcgttatcggagttgggcgcgcagcctatcgcagagaccgaactatgcggggctgaaaacgaagctgattgtgcgactttgatctatagtattcttgaaactcatgatattgctaaatccctgctatgttcacctctgggaacctgctcggttcggattcgttgagctggcactatttctaggctgccgttgttgatcttcaaatgcctcgataacatcagggcagctcgattgggccttgcctgattgtctggccaaatattcagactctgttaatcgcgctttcagaagttgattccgagtcttggaatgcatagccgaatgcaagcttttggctaagccctgtcccggataggctattaagcccaaagcacctagagatgactcattagcataatcccgctagtggtgtaaatgtgcatcacaaacctgatgcagctttcgtgcccattccaatcgggccttgaacaaatcctctgattgcacccatgaaaccatctttctgggcaccttcgtagggctgtcggaagatatcagcgaatccagttgtgaacccattccgaaagttatctgaggccgcagcaactccagacttaaagtcccggatattgtcgtagtctttcacctcctcgccatagagcctgggaacagccctcaggccttcattcaccgctccaggtatgtctaccaaaacgcccttgtagtagtaggctatgatcctccccacgcttttggcggaacccccaattgcctttcccgcaactatccagtcttcatctgtctggttggttccgggagtacgtgagataccttcggatgggcttcgctcggattgatttgtaggctcgataactacaagctctggctggctctgctgatgggcacgagtgatctctttgtagggcctaataacgacgtcgcttgatgctgtgaggatatccttatacatgcctagcacagacgatgtgccgcccgtgataggatcccatcgccgggtcataatgaatatagtttttgtctcgtatctagttcgaaatgtgtattagtataggtatattgaataggatggttggatatatggtctcacgctttcaagtcccttgtatcaatgcgagaattctcaagcaagatccccgctgccattttcgacaaatttataggggtctttccgttctgttttaactgccaaacagccggctcggaatcaagaaactggcatttcattttatcgatcggtaagttgcgatggaaagatgcaacagccgcagagactccagcttcctcggtcatttcacgagcaagatcaccagctgctgttagggtatcaggatgcaggcagaaacggatagcttccgctagattttccgcgttcaaagtccggtgtggaatgggaattggtccaaccccacgggacgcgaccatgtttccccaaaatagctgactgggataagttagcaaagagataggaaaagcctgcaggaatgacatactctccaaagaatggtacaataagcgagggtcttccaaatcgtaaaccacatgctgtagtccctgctcctccatgatgtacaactgcagcgaccttctggaacagccattcgtgcggacagtcctcaaggtaaaagatctgatcgtccgattcttcttcgccgagcttactccagccacgggatataattgcacggccaccccaggacctgactgccttgacgagtgtggcagtcatggctaggggatcttcaatgacgatgctgccaaatccaatatacaccggcggaggcccgctttggagaaacgcagcaaggtctgcaggtggtgtgaagtccggaggagcgcggaagaagaagccacagacatcgatatgtgccggccagtctgttggtttaggcatcaatgtaggtgaccagcaatatgtgaatggtatcttcaaagtctctgctaaacggggaccttcggtgagcgatatagcttctaggtcgatggattttctccaatcattgataacatcgcccaagctgtttgaggtcagcctattgcatcaagtatagcagggatgtatctggttgttacccttgccatgtcagccattcgacaatcccgtaagaaagataattcgccatcttcggctctgtggttgaatatttcaaatttgccaagggatgtggaaatgatctcgtactggtccacggcatggtaaacatcatatgtagagggatgccaagtgcctgagcgcagtggatatgagcgaagcttggagggttcgcaataatagcatcggcgacaaagggcgttttcgtaacggagtcatcctcaatacaggaccgccagcatccctggagaatttcgcctaccatgacacgcttgcgttgaatgtcaccctcttgaatggatttcatctgtggtatcaagcctgggttcttcaccatgtatgccatcagctccgagggatctcccccgatagaataaaattctagaccagagtcgcgcacgaagctctcaaacacaccatgtgtcgctagtcgtacgcgatgtccatggcgctgaagctcgttgcctagtgcgacaaagggctggacgtcgcctcggctgccaacaacttggataacgatgttgagttcaaggccacattcaaaatcacccgacggctctggctgtggttgtaaatgctccgcatgtagaaatggtatcaactttgacacttccctgcccactttggagtcgagatcgatatcaattcgaccatcatcttcgcgaaattagcaagatattctcgcaaacaagacagcgatataagaccgctcttacccttgacttttgtcccgtcctgagtaaattggttgcgttcaagcgtagaaggccggcgcggtggttcttccatcgttgcagcccaatgacatcacacacgggagatctatccgatatagaatttcgtcaagaagaccgatttgacttaggtatttccaaaaccctgtgaaggatccaataatttcaaacagaaagcagtatatgaagaggagtaatcccaaaacaactgaagaccatggtacctaggtggttctgggccgcgtgggacgggtggaccctcgaccgttgatcccacgtgacgtcaaatataagccaatcataggctgttttacagaagctatatgacgtcattcctacaacgagcaaaaggtcaatactactaggaatttatgttcattctgtaagttgtagctttgtgttttgatttagggagcctgttcatctcttttaaaataacatatcctggtaatacccaaaaatcaaccctcttaaaagattagcatggcttgtacctttaccgtcaaagccaggttagtgggaactgaggattatgagtggagagctacgaaattggagtcagtgttaagaacatcccacactggtccatccagagtcaattgcacatcgacggcgcgcagaagattatccggagctgaagagcgtctggtacgctggcctcgaggcagctcctcctcggtagacatgatgattgccaaaccgttaacccgataaccttcactgaacgccggcgacaccagagaaggggcaatgcgcttggcatcgacagtaacatcaaaatcaactccagcgtatgtcttgcccctactccactgtgtagcaacgaggcaaccacgtgggactttctctttgaacctgatgtgacgtttgttgggctgtgcggcaacccattcaaactgctgcttgacttggttcatatcaaccgagtgaattgtatcatgaataagctgtgcaacctcccagagtgcgcctttttcgagtagttcatgggaggcggaagccgaggggcagtagacggcattcggaaagtagcgtgcgggaagcttcagacgagtggagtcgcgcatgtccatggttgtccaaaagctgcgaagtggctcaagcgatttggcatctggtgtgagtcccttgttacgcaaaacctgaagtcttgcttgataaatgcgttggtagagataggctgagatgagctcgaaccttgtgaacgaggtcggttcctgggcgttggggtcgattgcagcattcttgattgtaatcagctcttgaccttggaagcgcagaggataactgctgacagagggagggtctgcctcagatatgtccgtggcgttctcgtccagacaatagtccacaggtttgaaagcaagggctttctccttctggctggcggataggctgttcgttcctctaaaataagagaagatctcagggggagagatgagtgttggcggagaagagtcgcgcaattgtctgtagatctcagccagatcacgcacaagctgcataaacccagtggcatcgcagacctgatggtgaactcgaatacccagtgcaacccctccgcagccgaatcgagtgtgctggatggcgaaaataggattgtgggagacagcgcccattgttgaatgaaaaattggaagaactgcattcccagaatctggcagaaaagttaccaagatacgggctgaaaaagcagaaactgcaatactcgagagcctcctggggcactgcgcttcccaaagctcagcgccagcgcccaggctaccaatctctagagcctggctgactggattctgctgcagacggccagtcaaatgcgggtaatagtccaggaggtgcgatgcagccaccttcaagcgctcaatcgtaagaaaattgtcgcctacaaattttgctggttttctgtatacgaagatgccttcgatcgtcaacatagctggcacgatatggtccatcggtcctagactaaaaggggactcgagcgcggcgactgtggcctcattggcgcagttaagcgtgtgccgcgtagaaacgcggacttgatccagtggcatcgctgtgattggacgaagcagagacaggatagcgggggaatcaggatggataaagacgtagaagagttgacaatgatagaatatgacgaggataaaaggggatgtagatgaaggggaggtaaaagagtgaaagtttgcgctgcttgaaagcaatggggagggaatctttgccgcgttgttgggatgataaactaatttgtccccctccgagtgaacaaaattaaatacaaaggccctccggaagcaaccacagtttattctgtataaactatcaaataaaatttaaaaaaatggaatcaaagaaagcagttaaggaaagcaatccgagggtgacgcaaatatatatcgaacaaagaactggacccgtagatgactttccgacttttacaaagacaacgtggccatgtcaattgcatcgtctatttgggattaaggaaagtgcgagggaactgtcgcactttaggaagacaggtgggttgggggtataaaagggccctccccccccaactcttcttctcttcttctcttctccctatccctctcagccaccatctctccgtagcccccatgagacagcgcaggcagagggtcccgtagcacatgctgcttcacctaccacagggaccataacattaccatgtttgttatgaggtccatgtaggtctgcaccacacatcaaaccgggctttctcgtggacgttcctgaagtcgtggctctcattgccacttgacgagtcctacggaatacatgaggggtggtgatggctgtagctgaagatgcgtattctacccagattgtctattcttatcgttatattctcatgactgtctaaacggagataatatcagatgatacctgaagcgtgaaggaagcaatttgtcacatagctgggagatattctgttgaggataccaaaatacaactctggagagtattggaacgtctcatcagggctaccataatcttacatagtaatctctgaagaatgaatgtgctctaatatccaaagatcttgtgtctgattctctcacaccgatagtagctcacataagctttgcgtagacaagacatcaagcctccaaaacactccggggtgcttaagatggaactgcaggtctcatctaccactctatactacatgctaatagtagtatgtgaccgttgaatgctcgggggcggctccgaccaagagacccacttttaggcggctccgatgtggggaccatatctacttgggtatcaaatgttctaaatatttaaaggcttcatctcatgttatctcaatcccaaattagcacgatctattccttttttgtttgactagaactctacgatggccaatccctcaatcgtcattgtgcccggcgcatggcaccgtcctgcgcactaccagcacctcatcgaggagctcgcaaaggtcaactacgatgcagaggccgtgaccttgccttcggtagactccaatccaccactggccacctggaatgaagacgcgcaagctgtgcgacaagtgattatgagcaaactggacgctggaaaggacgtcatcgtgctcgcacattcatttggcggcgtcgccatgtccgaggcagccaagggtctaggaaagaaagaccgagtcgcacagggtttgaaaggcgggattatcaagctggtctacatgtgtgcgatggcgttgccgaagggccaaacccatatcggccagttggtcccgcagacgcccgaggaagaagagatggagcgtcagcgcaaggagatggaggaaaagctcggtggactagatgtgtcaccggtatggacttgagtctttgcttctatataccttcaatgctaatctgtccacaggatggagcaatcagcctcccgaaggaccgtattcacctcgtcttttataaccgttgcgagcagaaggatatcgagagggctgtggagttgctcggcacattccccgcgggcccgttgaccgttcctgccacatacaccgcgtatcgtgagatcccgagcacatacattgtctgcaaaaatgatcaggcattgcgggaaccgttccagcggagaatgattgcacaaggtgagggctgctttgaggtagaggaatgcgatgagggccattccccatttatgagtaacccaggcttcatcgtcgattgtattcggagggcagccggagagaaggtctaggcatgcgaagacgttgactaccttgtcgccctctctatgtcccttgagctttccagtaatatccttagacctgggaagcgtaccatatttgagatttccatgttttatatgatgattctcctcttttccaaatccatttgaagctagaatttaacggttgcctcatttaaggcataatcaggcatcagtcgtggcgcggaacggaaaatcaatccagccgcgtcggaaataaccagatccagcggacgcctctcttgtagttatcatgtagacacggaatgccgggagacctcaattctcccaaggcgtcaattcctaccgtgaatccaccgcggcgccaaaatacaagttgtgattcatgccggcgttccaagcggcgatgtgttgtgcagtcggacccagacggcattcccaatgcgatatgcacgaattgccagcgtttgagacgccaatgtacgtttgaattcgctatagcccagtccagtcttcctttctcgcgaaaacgacagaagcgcgactgcgaggaaaccagtgggccaacaacgcaaaatgaatcgaatgacttcgatacaacaatcgaggaaatcactggaagctcgatcaatcgattcgatgctgcatctattgctgaccaagatgttatggcagcttggctgaatcttgattatgatgagattgtcgcggatagcgccacctccttttcaaccaacctcgaaccttctaattcattcgatgcgcttcgttctgagtacatagcgcccgcagagagccaacttacggccaccacatcccaactgactcgcttgcatcgaggacagaatatccgatcagataatcaccggccaacaattaggctttcactcaacagtcccatctacctgctgaattctggagtagacgcgaagatctttggtgatcgtctcgcccggatctatgaagcaatagcaacagccagtgcatccagattcttggactacgactgcaatctctatgcgactggcagtcgctaccggttgggggacaatgactcagggagctcaaatggatccgaaactgccaggccaaccgttgatgtaaccgctatctcaccacggcttgatctttcagtatcatcgcaagcaatgtctcatgaaatttccttgataggaagtgttcggttccttgatcatttgggcggtctttatggcaatcgactgaactcggctgctcggaagaaatcagatgacaccttctatgctgtccttcgcgtattctcgatgcaatggttaccgaactcaccttcgtttgaagtgggttctccttatgatcactttgctcggaatctagaggcgggagatgactcttccttgaacgccttcactgatgcttgggtgcgggcaagatcactcctcaatgatgcgcacgacgttcggtcatttcgagtggtattggcaacactcatgttcgttgggattgttataccaactaaaataactgatagagaggatctcgtaccgaacgacttccttgacacagctctgcaaaagttatcctatttagatggacttgttacacaatactgtgcgaacgtggggccgtcatctatatatggagctcttgctgaagcaagtttaagcattatccgatggaccgcgtatattcgcgacacaggcgcagcgttagcgatggatcggcaatgcaaacttccagatctgtggggtactacaaaaggttagtattttccatatgggaatatcaaattcaggcaactaaactaaaatcgcacagtcctctcaaataaagaggccgtggcagcattggcagtctctcagaatatcttagagttggatatcaatgtccaacccatctgccggaaagcaagtgcggaaatattttgtgtctggaggcagatcataagcatcaaaacagttgctaaccagtggcattgcactatcaatgaacggtcctcgtcaatcattagagcaataaacttgagtgtggcagctgtccgtgacttcagccaatcattccaacctttcatctctcagtgcatcagaaagttcgattgtctgtccacgtctcccaggatatctcttggtaagatatactcctaccatccttgactcatcattctctcacaatgctatcatcggcatcctactgacatttatcccttagtttctctcgtgatgttttggaaccttggcattttcctattcgccgaagtatttagaaaggtgaccaaagaccttgatacctacatcgaacaagaatcaggaccaaccgtccgagaataccagcgcgaggcagcttcatgtgtggcacaagtagttgaatgtgtacacagcttgcctaccgaggaagcttttaacctccagaatggactcggcgccgaagtcccaatcaccgcttatcatgtcacaccgagcttggctgtcacgactcttcaacgggccattgagagtgtgatagacctgcaacttcgctctcgctctgatgctgatttatcagacttatcagacgacacgcagtttttgataccggatgggacctgggaccgacaaattgacattctcatgaaaggactcatctcgcttgacgttactattggcggatcacaaaccagtggtgtggccgttagagggttaatgcacaaacatggggacataatatccgagtgttggacttcggggtttgactcatgacatgcaaacgtggtggattcagcggaaagaaattggtcgatggtaaagccaagcacattccttcgatattcctaggacaagaagacgccagaagcattttggtacatccgtagaagccaggatgctcaagtctagtttgacctagctccattccggaggccagcagttcctgtaactaggattatgtaacagtttggaagtatcgggcattcaggtggaactggcaaactagtaagtaatcgatgtcgtcatccatggatgggtgcaacacaaatgtgcaggacttttggggctacagtctcttcgctggtgattggaagttcagaatcactagtacgcacacaccgttggagccctacgcgtgtatacataatagtatatttatccttagtcctttgtgacgtgattcagaatttgtcgtgaacattgccaacatcggacaactctcctctacgggtggactaggcgccccaccgcctcacccgcgtgcaaacccccgagttttcctcctaactgtgataggtcagtaataaattggacattatttaaacttttgaggcttgcgccagactgtggagaatgaaatctcttttccaaccatcaaggtgaaaagtgtatagccaagaactggaccatttattcatggcccccaacgtgccaaagtaccgtccaatcacgtagacaggtgatggataattctgctgccttgctgcatgatggcgcgtctgtgttgtcggaaagcgaacccaaggaaaaaagcttttgcatactttgtctaagcctttcaatcggcaaaaggatctctggtatgaaaaataaaagtaacatcttttacggtccatagcttttagaacatagaagcacaatttgtgtaggtcagaagcaagacgatgatgaacagggataagaatgaatcagatccaaccgacgcatgcaaccatctttcgcacactcggagcttcaagggaaagcttgtacatgtagccaagctctcctcaacggtaacccagtcttgctgattagaatttatctgatcgcaaataaggtttaatctgatcgaatttatcagatcctccaagttatctgatcatgaaaattatcagattgaaagttatctgatcaaaaaattatctgatcacgccactcggagaaatccttggaaccaggcccccacaatccatggatgtttactacggatgagcagttatctgagaccttacgaagtcgggatctcggagtaatttcctgcatactaccacagcaaggattgtatattaaaggccccacatggtacaggaaacgccaccctcgcttacacaaatgggtacgacctaaattttaatatattcgaaagaaagaggttaaaaaatacccccgccctctaatcattcattccaggcttccacaaactacctgacacttccactcatggatacggaggacacgtccaccgtcaaaggggccaccacagagcacccacagcccctggactcagaggaatcaggtattccagatggagagattcagcaagatggtgttcagattgccgacgcagtcacaaccacgtggtctcgcaagcatttgattattgcttatactaggtgagcaaccttgctataagatgttggtcctaaatgccagatttaatgtgaaaatagtatgtggctggtgtatttcgtcaacaatctcaacagcagtctcactgcaaacctctctgcttacatcacgagtgacttttcggaacactcgctactgaccgtgattgcggtggtgaccagcgtgatgggtgctgcatgtctgatgcccatcgccaaggtcctgaacctttttgatcgaactgttggattcgtgatcatgatcttgattgcaattatggggttgatcatgatggctggttgtaacaatattgcgacctactgtgctgcacaggtgggtttgcatcatcaataccctctacagggctatttcaagatcactaatgaattcataggcattttatactgttggattcactggcgctattttctgcattgacgtgataacctcagatacctcatcccttcgtgatcgaggtcttgcttatgctttcacctcctctcctagcatgatcacagcctttgctggctcccccttatcaaaccaattccatgaaaccaattggcgatgggcgtatgggacgatttgcatcattctccctatcgctgcatttcccctgattttgacctgggaaatggccaaacgaaaggccgacaagaaaggccaattgcaatacaagcagaggacaatacgaacctggacagaaagcatttggtattacactatggagtttgatggttagttgcgctctcgaatccattcctttcatctttactcaccctgtttgcgacctagtcgttggaatcttcctaatgataggcggcacgattcttttcctgacatctttcaatatcgccggcaacaccgaaggccaatggcaatcgcccaagatcattgctatgatggttgtgggattctgtgttctcgtagcattcgtcggttacgagcgatggctagctccgaagcctttcatcccattctatctactcaccgatcgcactgtcattggcgcatgtctactcgatattacctaccaggtctcctattattgctgggccagctatttcacctcctatctgcaagtcgtctacaacacaagcctgatgcaagccggttacatcagcgccattttcgatttcatggacccgatttggctgatcggctgtggctttctcatccgacacaccggtcgtttcaagtggctactctgctgcgccttgcctctttatctcctggcaagcggtctgatgatctacttccgccaaccgggtcacaacataggatatatgtgcatgtgccaaatcttcctcgcagtgggtggcggaacatttattctgatcgagcaggtttctgttcttgctgcggcctcgcatgaggactatgccgccatgttggcacttctcagcacgtttgggaacatcggtggcgcggtgggcagtagtgtttccggcgccatctggacgaatacactccccggcaagctacgccagaatctgcctgccgacttgaaggaccagtgggaggatatatacgagtcgttggacgtacagctcagttatgcggttggttcgcctgctcgtattgctatccagaatgcgtatgcattcagccagcgaaacatgatgattgccggtactgcggtgatgggactttcaattatctgggtgctcatgatgaggaacattaaagtacagtctaacaaggatctttccaaggtccttttctagacggagaatacggggctcggaagaagatacatagactggtggactttctttctcaaaccgatccaatccataatggatcgagcccagttcagggtagctggaattaattggttacggtattctacatatattgcaacgttaagatggctttcacgcatttcatttcaaccagcggatcattatgacatgagaatttttcacttctcctgggagatgccgccaaacgcgccatgaacttaacactcgtatatcggctctcaaaaccagcttgaattaccgagcttacacattaacaataactaatgtggacttctacagactagtcgatttgaattgccgtaggctccataaatcaagattcccatcgatctaaagactagtatctactctactcggccctcaattttcgagaaatactccatgactccgtacaaaccctcattactcacctcccttttcatctgaacttcctgggtacgtagatatccttactttttgttcttcgtgttgttaccaaatttggtatgtgcgaaactttggatagaaaacatgagctcgagagatgtttgtctgccaaggggtagatacatcggaaaccagtattgtcaatattatgctatgtcattttgtaaacctcactctcacatgaatccatcggttatcttgatctctttcagcttgcgaggccttctaggcaacccgtttatatgcccatcatgttcatcgttgttgccagtctggtatttccgaacacacaggtactctagcccaggtggtaagcagtttatcagtctaaaccttttcctttccttgtaaggcccactgcgaacaccagcggcaagtctatatccaagctcacccgttttagggccacaaattctttcagtgacccggcttgtgtccatatcaattgataaaattcacgttctgcgtctctgattccgcgttcaaatggacccccgtgtcgattgaaatgatcgtctccccattctccccctccgatgtcctcgtcgaatggatcaatctcatatgtcaagctaacatcaagaatctccagtgtcttcttgtgtgcacaaagcgcttttataaatgctttggggctgaagatagagacgctgccacacattctcgccgtgaaattcgtaagtatcttgcaagaccatatcagattcgcaaagtagagagagctagctgccgtacaagagagagagatcttgctgatattagaacttttttctttgaattcaagttttccatcatcaccctccttgtctccatgactgcggacggactcaattgacgggagagtgtcaaaaagcctcaagcagcgttcaaagtccaatgagaaacgaaaaccagcataatgtggaacagttgtctcggagaggtggagactacgaagattgcgaagatatgacttgttttcgggactggcattggcttggcgaaggagcttgacaagcgggaagtccattatattgctgtagctccggccacggggttggtccaccttcatcgtcacaatgttcggcgataccacaatcagaatggtgaccaaggcttggatgatgaatgcttcaccgccgacattgcgtctgtccacctgattagatggtcactcggagacgaagatcgaatgagattctcacctatgaacttttgctctttttttcataagcatattaaccactcgatccccttgcaggcttgtaaacccgccgtttctgagcgctttgcgcacgagacctatctcctcgttgctcaaatcccgctgaaatttgacttcctcgtggaccgtaaaccagccgtttactggtggtctagtggaatcgactttgcgcacgtaatgacccaaaataggtcgtttcaagatatccataatcatggctaatggcttgtcggtattttctgagcagatttgaattcggtaatacttcccgcgcgctaccatatcgcacagagagtgaagagttcgacattgtcttgatagagcagccacgtcatagattgaaagcaggtatgagataatccgatggagaacctcaaggggtagactgagaaatgacatgatttctgtactgtcaatatggaagggggggagggggaagggggttatttcaactacatttgtacggctttgcctctcctggtaaggtggctattacctaggatttgtcttggcattttgagaatttctgttgacaacaaagaagacgaagagaatgacgaaaaacaaatttgtcatgtcgtgatgccccaaaaatctgtcgttggccccgctggatctctccgcggaatgactttcctatcctggtgcgcggggatgtatattaaactccttccactccaacttgaaccattttaataacttcagtttcaaaatgactcaaatcttcctgtgagtggctttattcctgataaagcatgatccatgctttgctaactcaaattctagtaccggtgcaacgggctacattgggggcgaagtcctccacgctttacagcatgcgcatcctgattacgaggttgccgccttgatcagagatgaggaaaaggccggcaaagttttggctgcatttcctaaggtccgtgtagttcttgcggatttggacaatgtggaaatcattgagaaagaatcacgcaaagccgatattgtcatccgtgggtcaatttacatctggtagcctgatgtatcactaaccttctccatttagacgctgctagtaacaagcatctcgaaagcgtgaaagcgatcgcaaatggcctggccggacgtcaaaatggtatgtcgtctactgcttcaatatcttctttcgggtttgatcgttaattgaagtaaaatgcagcctattacatccaagttaccggggctagcgttctgtcaggtcctgaagttgatagcaactcatatggtgagccctcggatcaaatcgttgatgatttggataacgctgccgatctccgagacataattcgggcgtacaaagatcgtcgggtggtggataactacattctcgacttgggatcaggtggtcccaaaaccgccattcttttccctcctatcatattcggcactggtaacggtcccgtgaatcaacgtagcatccaggttccctcattggcccgggccgctttgctacaacatgttggtctataccttggcagaggactaagtcgatggggcattgttcacatcgctgatctggcggatctctttgtcaaattggtggagcatgctgtcaacgccactcccagtcctatctggaatgggaacggccttttctttgtggaaaacggtttcgaggttagttcatggcctaatatgtcacttctccgcgctaaccttcttgtttttctttcagagcttcaaagatgtcgctttggtgatcgccaaagaggcgcatagcctcggttacattgattcgcctgattcagtgcaatccatgaatctcgatgaggccaatgtagttatacccaatggagctgtgttcctgggtaccaatggtcaaggccgagcttcacgggcaagaaagctgttaggatggcaaccagatggcgagagcttccaaagcgccacgcgggagacaatcatcactgaagcagcacagctgcgatgatttctcaagcattgattgcaagttcaatccatgttattcagccaaaatgctatcattgatttcacattctttacgtaggaccagcgtaatattagataagaaataaagaaattttataacctttgcgaaaatattacgatggcatatataatctgtctcggaattctactggattactccgtactgatctttgagttctcatagatgactttgacaaaaatggtggaactaaaaagggactatatcaattgaaaaaccactagccaccatcaggctgtaatcaacccagataaccctcctccttcaaaatgcatatagcttcaacagcaattttatatccaaataagttgctaatcatcagcctggaggaacgaaaagtcagtgtaccgccccgccgccttgtctgaccgcctcgaaatttgccggactttactttttttcatttacgatttttatcaccgccaaacagccctctttctcatcacaatatattgctttctttgactcttctccacctcgtcgtcctcaatcatcatggcgactctggcggagaagcttgagaagattaagtctcccaagctgcagaaccagcatcacgtaagtttccctgttgcataccacccaatgaattgacactaacattcatgaacagaccgctgtggtgctctctgcagttgaggatactctccgtgatcaaaaagcagacttctcgcccaccgcatattttgctgctcttcttgcactgctctcgcagtcactgtccgcatcccagggtattgtcaacaaggacctagcgacatccgttgtctaccttctcgacatcacaaccgtttacgtccccgccccgatcctttgctccaaattttcccagatcctcgaaggtcttgcacctgcgctttctctccccgaggtcgaagccccgctcctgcgtccttcaattggctgtcttgagtctctgctcattgcccaggattctgcatcatggaatctcccgcacacacaggtcggaccgcgacgcgcaatggcaggtctactgagtctatcggttgaccaccgcccaaaggtacggaaacgtgcccaggaggctcttgtcaaggttctcaaggcgcccccaccgagcccgtctctggaccacccgggtgcggatatgtgcgcccagtctgcgatgaagactctgggggatagcatcacagccgcccacaagcaaaagaaaggtcgtcatgatgctcaggccaacaaccatgagccccttatcattcactcgttgcagctgatcaagaccattgcctcggcgtcaggtggctggcccagcaagaagatcgaaccgctcagcgaacttctgatgaacgcttcccgctctagcaatgagtacatcactatgggtgcctttgaggtatttgaggtcattttcgaaggaatggcggatgaattctcgtcttcaaagctgccccgtcttttggatgctatctccgaactcaaacctgcgcagaatgactcccagcttctccccccttggattgcagtgctctcgcgtggttacgatgtggccgcacaaatcactcccgaggatactttcgagaagttgccggatctgttcactttgatttctggattcatggcttcgccttccagcaacatccgcgtttccgcatcagagtgtctgatctcattcctacacaactgtatccctaacagtgttattgtggatccatctgtgtatgacgagaagactttagagaagttgtctcgtgcagccattgatcttctttcggtgaagtaccaggctgcttggaaagaggtattcaatgtttgctctgccctcttcgattgcttcaagtggcgatcaagcccatatctggtcaagattgtctccaccatcggtgaactgcgcagcaatggcggcttccacggcaagaaggaagccgacgccgtcatcagcagtgctatcgaggccatgggccccgaggcagtattggagattcttcccctcaacattatcgagcagaaggctggtcagcccggccgtgtctggatgctgcccattatgcgcgatagcgtgaccaacacgaacctccgccacttccgtaccgagctcgttcccctgagtgaggcactgtaccagaaggtagtggacttcggtgccgctgagaagtctgtggaagtgaagatcttcgaaaccctcgtccaacagacctggggtacccttcccggctactgcgagctgccccttgatcttgaggaggcatttgaccagacattcgcggagctgctgtctaacgttctgtacaagcagaccgaattgcgtctcgatgtctgccgtgctttgcagaaccttgttgagtctaaccaggctatcttgtctgtcgaaaacgatgaggacgatctgatcttgcaacgacgtatcaccaaggccgctgcaaagaagaacctcattcatcttggcggtcttgcgagcaatctgctggctgtattgttcaacgtctacagtcagacccttcctcactaccgcggctacatcctgcagtgtatcaatgcctacttgagcatcacccctgaaaatgtaagttgccttcagtcgtatgcaaatttacacgactaacacccttcataggagctaaacgaaactttcacccgcgttacttcgatgcttgaatcttctttgattaccgagcaagagacagcaaccaagcagagtgcttcggctcagaacccgtccgacaagatgccaccgacctcccacactctgattgacctcgttatcgcaatgtcaatctacctccctcgctccagcttcagtggcttgtttgccatggcggcggctatcctcaacagcacatcccccaacccggatcagcaactgattaagaaggcctacaagttgattccccgacttgcaacgaccgagactggtcgcgctgccctccaggagcgtagtggagagttgcaggctctcatgcttgccaccaccgataccacccctgcatctggccgtcgcgaccgtatgctcgctatcaccgagataatcaatcatctgcctacctcggacctgcatttcatcccggccatcctgtccgaggtggttctgggctgcaaggaaagcaatgagaaggcacgcacagcggcctttgacctgctgattctcttggccaagcgcacaaccgattcagagcgtaaccctcccggcactctcatccgcagatctcttgtgcccggtgtggcggacgattccccggatgcgcctgctaccctcgaggagttcttcacaatggtctcggccggtctggctggctcggctcctcacatggtcggcgccaccgtcactgcgctttcgcgtctgttcttcgacttccagaaacaactccagccggagatgctcaaggaactcgttgagaccgttgagctcttccttacctccaacaaccgtgagatcgtccgctccgtccttggcttcgtcaaggttgccgtcgtcgttctccccgacgaatctctacgcccccgtctcagcaccatggtccccagcctcatggcctggaacaaggagcacaagggccgtctccgtagcaaggtgaagggcatcatcgaccgccttgtgcgccgattcggtgcccctcttctggaggctattgtcggcgaggaagaccgcaagcttatagtcaacatccgcaaagcccgtgagcgcagtaagcgcaagaagagagagggtgccgaaggcgaagacgaagacgaagaggagaaggcctccaagccccaagccggcaacgccttcgacaaggccgtctacggctctgactcggactcctccgacaactcggacgacggcgacagcgacgtcgacgtcgacaacgtcgcccaaatcaagggccgcaactccaagaaaaaagcaggccagagcacccagtacatccgcgagatgtcccccgaggacaatcccctcgatctgctcggctcgaacgccctggccagcatctccaccaccaagcccagccagcgcttcctcaacacaggcccgggctcgaagaagaagcagcgcaatgccaaggtcgacgccgacggccgtcttgtcctcggcgatgacggcgatatcgtcgacgacgtcgagatgtccggtgctggtgacggtggcgtgaacgcctacctcgctgccgtcagcggacccgatgctgtccgccgtggccagagaggcaaggtgaagatgggccagtcgtcgaagaagaacgcaggcgatagcatggatgtcgacgaggacgacctgaagcaggacctgcgcgcttccggagccggtcagagctccggccgtcgtggtcttggtgcgcccaagacttccggtgcgtctggcggtggtcgcgttgagaagcgtcgcaatccaggcaacgctcctcgcggtggtaaccgctcgggatggggcaagaagagataaactatttactctacggtgaatcgtatattttcttgccggtacggatactgtaagtggagaagagggtggcatatagcagatcccggagttatcgttctgagttcccttgtttttgatttttgatttttttgtttctgccatctggtcttcggtccctgtcgtgcttggttagtgttgacgttctcataataccctccgctgtggtgattccgttgactctgggctttttctgtttcgatgcagagttattgactccgtgtttttcatgatatgattacgattctattcaaaagtttctattaggtcaatggacatagatattgttttttgtgtgtggtctatagcatagatgagtagctttatatttgacaccatcacgaatcatccgatatcacatgacactgatgaaatgctactaaatgtacaactacagctagttcaaataccagaacccaaatgcaatgattttatcatatcctcatttgcaaagcagttatcatgcaaaaaaaagtgtatcgaacatatcaatcagaacttcatgaacgcgagccagccaaccaggcagctcagcagtatttcccacagcatccatcgctcgctccgagaagtaaaagtagacgtagatgtagagcgcgacgcaaaggggacagacaacaagaagctgcaagcttagaccagacggcatcacatccatccaagcgcatagcgtcgacagcttcctttcctcgcagtatacagcagacaggacagtacagtacagtagtagcagcccactgcgagcatccgaatccagccaaaactcctgccgatgcaatttgcaattccaaacgacgaccgtccgtatccgcacggcgcgaaatcaaatcgacaccgtcgctcatcggaggtcatcgagcagtttatgtcctaacgcccctttgttctttttccttttccttttcaacactcggtctttcaacggtatcaacccgggagatagagaaagcgataagtcgacagaccagaccagatcaaacacacaacaagcacgtggtgacaatgcgataattagaacagaatctccccgctgtgctcgggctcgaaaccgagcgcttggagttcgtcgtagcgcttcttgtcgcctgttttcctctttgcgtcctctttcttcttcagctcgaagacttcttcgaatggggctctggtcagtgtgggcgggatatcgtcttcgcggtcaaggtcctgtgtggaattgagaatgcgtgagcggggttcctaccagtataccttaacttgcagcagggattgaggagatcataccacttcgcctagcaggagcacgttctctccacgaacaatgaatatgccacgtgagacatcggcgtacagctgtccggcgtagacgcgctctatagtatcctggaaaacaaggttcgctagaagatagcatgtcagataaaagagcgagacagattcaagagtagtgcgactggcataccgaactggtcccagcttctgagaacgccgataagtttgcggccgtcgcgaaggatgagtacaagtttctctgcgattgcgtcagtcttctttctctcccttgttcttcagctctaggccgcttgagtgcagctgcacatactatctgttagatcgagcagctgtgcggcggtcgtgaacatctgcgggggtaattgcggcgggccgcctgttggctgggggcctgctgggccgagggcattctgggtgaattgttggttttgctgcggggtgcgagaggccggggcagggctttcgtttagagataggcgctccatggcgttgtctgtgttggattggcggagggaaaatcggaaagcggtgtggaggggtagggagggaggcgggaggaggctgatacagagagattcaggaattggaggtggagcttctcattctgtttctgatcattcgcgatggagggatcgaggtcgcaaaggccgtcatcacgggcggtgagtttgtcttgtttgctcggggctgctctatacattttggtttttgatattcttctgagacataacatactctatggaagaaaaaaatacacttgccagttctaagtctgaagaaaagtacacgctatacaaaagcgaaagggggaatatccaaaaaaaaaatcaaaaaccaaaaaccaaaacgcgtctatatctacaacaccccgacacccctctgctgccccctcatcctctcttcccgccgcttactatacggcgcacagtacggctcatccgcagatccaatactagccctaaccccatcctgcgagcgatggtaggcaggactcgacggcgcaggcggcaactgcatagccttgaactgcgcatctgtgataacgcgcatgccatacagataccgcatgagctcgaaatccggccgactgcccgcaagcgtctggccaagacagtagtggtcagcagcgacgtggtcgagcatacgatcccacgccgagggaaagtctccagacaggggtcgaaccgcgtcatcgctagagcggatcgactcgccgtcctcgagaaccggcgacgacacggggtccgaaatcccgtccacaaacttggtattcggacacagcggacaccgcgctgacggcggcgtcgggtacgagcgaaagtgactgacgacgtgggcgcgccactcggcgctgtcggcgaaggacttgtggcagtccagcatgtggaagaggcacgcgtatgtgcgctgctcggcgcttgtgctcgtgctggctgttagagaggggggtcttgacggcgagagagcggggtcggtggttaacggtgtcgggtcaccgagaacgtagatcccgagcccatctgtgctggtatctccctgtgcggagtcaaccccagtcccgggcctggtgtcaactgatgatattgacggggacggggatgcgctcgacaagtccggcacggcgggtgaagaggacatggcggtgacgacgacgcccggttgctttcgcttaggctgtctttgcgacagggcgggggtcctacttgaagcggtgctgctggcggtcgaactcacgctgatactgacgctgcgggtagaagacgatcggcgaaggtcgcgatctctatggcggtctctattgcgtgaatagaggagctggtcgaggtcgcctcgacgagagtcccgatggtcctgggggcttgtgggcttgcgctccgacatgctcgatgcaaaagacggggaggtctagtacacggggtggatacggctggatcgtgtcagagtcaggttacccggggttacatagcaataggagtagccttcgacgggtagagttagaggtatgtataggattagggaggagaggagaggagtaagtaatacggatgaggggaacgggatagaacgggagatacatacaccccaaggatccgatataagatcagcagaataccttcagatctgcactttttcagcatgcatgacatccatggccgttctgcgcgtacaatgtagacaagggtatatagaaatgggctgaagtgggggtgcggacttttggatttttttttctgaatcttagggcggggcaattggggctagttgggctataaggattcagatggctatactatatacactatcacctggatttgtgtatatttctttacctgtctttgttggggataggtctgagatacaatgcacgggcggctgtctgcaggttgttttcgttggatagaggattacgctttgggaagtacaacataggaagtacaagatgtattcgccatttgtggatataagattatataaaagatcttcatagtctggacctagaggaacatcgaatatctaggctccatggatctacgttagtattcttcacaagtacgaagagcagggttgagaaggaatctagatcgttggacgtgttctagacaaagattcagttgacatgtgaatgtatctttctgattctattcttggagataatggaatagagttgcaatattgtttcagattcgatgtcaaagacatccgaagtattcagataatactaggctgtacagcatacatcgtatgtagatgccaactatacggccaagtgaattgcggggagatatcacatgcaaataagccaaaaccgatacaaagaattaagagtaaatgtcttgatttgctcacaatgtgaggaattaagtaagtgaagagaagtgaagtaaaggaacaggttcagaagtaaataagaccacaggcctcgggagaggagaatgacatagaaaagtaggtctttcgacacgaattttgaactcgaagtaaaaaaagaaaatctccagaggagtgaccagccaggggtaaaaaaagatcccaatccgtctatttggtggaagcgccagagataaaatcaacaaacccaatccgacaccgttgatgcccgcaagccaggtaaaaatgcacaagtctatatcgtttcgtggcgcgcataacataagttttcaaggcataaaaggttgcaaagaagatgagttagaaccggtctgccaggtccccgccagcaacggaattggtggctgacgagttcatggaagaaaatccggccgcggggttgagcatgtcctgcaccgcaaccttgggaatctggggcacgggcaacttgcgctgtgtgccgtcgggtttcgacatgatatcggagatggttgggcccatgtgcccctggttggggctgtaataattgggcccttctggttgcggctccatgggcgcgagatcaggggtgtgctggagagacaggtggcgaatcgaaggcagatgcagctcgctggcaccaagagggcgcagacggggcgagtgtgcaggagtagccaatggagtgtgatcaggggtaggggagagagaatcgtgggagaaggtaggagaaggagcggtggagttgggagagttgggacgagagcgcttgacacggtggccatagccatcatcgtcatcgttggaatgcgaacgggtcatgttctgcgaaatcgcatatgcggagagcgaagggaggccacggctagtgccgtgatgacgggagccgaaaatctggtgtccccgcgagccgtggaagcccatgtggtcatcacgctctacttgcgacgccgctgtagccaggagattgatatccattccggaggaagcacgctccgcggtgcgggagtaagggcccaaattcgagcgcatgtggttggcgtagttggagaaggagtggggaggggagacatccggagatccgacctgcgatactggcgcggagcgagtgataggcttgctaggaggtggcatcatgttggaagcattcattccggagtcttggcctgcggcggccgccgcccccnnnnnnnnnnnnnnnnnnnggcccgcggccgccgccaggtgctgagccttgttactgcggcgcgagttggggttgttgtggatgcgcgaatggcgagttagctcgtctgatcgactgaagcgtttcgtgcagccggggaactggcaggcgtgtggcttctcgccggtgtgcgtgcggatgtgtctcgtctggtgctccaggcggtggaacgcacggtcgcaaaggggacacttgtacggccggggcaggtcctggcggatctcctcggtcgcggggcgcgcccccttcataagcggcggtaacaagctcactgaagaagccattgaatctccgctcgaggatgtgtcggattcgtggggattaagtagatttgagaatcccactgaagaacccggcggtggcatgtgaatccgtgcggcggattgatgggtgatactgaaaggaggaccgagaacgggtttatcgcaggggtcccgagctaaggtcgatcagatacccggattgggatgggaaggtcgatcgggaatcggagtgcggcgggaagagttctgatagctcgggttggttataaaccacgtagtcgagtagtgcagaagcgggagcaagagggaagaagaagggggaaaaagggaacctggagacgacgatctggggagtcacagataatatagggaatggagggggaagggagaaatcgggggagaaggggcagtgtcggaatcggacttggagaaaagaaaattctgaaaaaacgcaaagcaaaaaaacgaaaaagaaaagaataaaataaaataaaatacgtccaggtaaaaatgtaaaaatggagagtgtgggggagaagaaggggagacatggggcaaaagaggaaaaatacaaaaaccggaaattcccaaaggggaaatgggaaactaaaagaaataaaaaagaaataaaaaaagaaaaaaggacggtccttactggatgtacatcaacctggctatgtactatttaggatagataactgaattaactaataactattccaatataatcatattccgctactctctaatattcttatagtattgctgtggtatactaactacgtaactgcataaaacaaaaatgtggggactcgcattttgctgaagaaccgtgtggcgtgaggtgcgtgtccctatccggctatcgcgcctctaacaattcttatcagaacatggggggagatatcagcgctatctcgggatgacgagcaaaagacagtggatgagaaaagaaatggtggcatgcggagagccgatgacgagcagaacccggggtcgccagtactcaatataaaatgatagatactccgtgcttccgtgctccatagcaggtacggagtacatagacatagtcctgcgaaacccagggccaaagtctgggggtgacggtcattctaggcccgaccagtccaggcccatgtacaatggatgtacaatggagatcctggggaccatctgatcccgtcacggagtgacgatagcgaggatcatcgatgatgtcgaccgaaacgaaacgcccaagggttaattctggtaatcatttagtcatgcgaacacaacccagtcaacaggtcatccaggcatccagcgcgaagacgagatacgaaaatgattcgggttgttcattgctcaagacttcatcatccggaggaatcatccccgaaccctatatatcgaaaccctgggatcaaccctgggatcgtctgctcaggttcgccgacaattcccccggattttggggtaagatatgacgaatttatatacggagtacatataattgtatatttctttaaccgactgatatattgattgtggaacgatagaaccaacaccgctgataggcgcggatcatccaattattgatagccccgatgcagctgccatgcagccgcaaagccgcgtatctctagatgccagtgtcagcccctgcacaatgcgcactcggctgtattccttgcgcaatcagacggcggtatccctgactgccaagacgcctaagtatagaccccgggggttgatttcctgaatctcacatcagggtattaaccggggtctggggtaccggttcaagataatattaattacgcttaacaggtattgaatattctcctatcagcgatcgagatatcttcacgcttcgctaagaaggcaactataatacaagattacatactttcgcccgaagttcccccggcttaatggaagaaaagggccgaggtgcgggataaacgggacggggcaaagatacgcccactcggcaaggccgtcccgccgagagagtccggtttgcgctggaaggcgttatctttgggtccggcatagcgttactccgcgattctattgtatgtgtaggcatattgatttgatagatacacatacatatacactaaactttacactacaatacatatcaggggatactccatcttgcagggtctagtggcggatcctaacggaagttttacccccgggcaaattcactcgatccccacagttcacgatggctaaattccttggcaaattaggaccagcacacaaacgcaaacctgaaagcaaagcggaaagataacggagtatcagggcccagatgcctatgttgtatgccggcccgactaccgagctggtactttttgatcggggatctagaaatcgcacgaatccctgccaggtttaagaaaatacaaggtaaaatgagctcacaatatacccgacggtacggagcacactgccgcaacctggagttctccatttttctccacggggaataatggcgccattctggtcaaaggccggactcggagtggcaataatagcggtcttttgttattcttcatctcaagaagcaggtaccgtctcgaagcaatgacccgccttttgccgaatttgcgacgtgtacggagtgcatttgctaggatcgtgaaactaatgagggtttcggtttcaggtgacgaattcagatctatcagttgatgtactcctcgtgcacctgctggaaatcggaatattcacagaacagatatccggattcaaagttccgacatatattcctgaatccttccccagaactcgtctcacctgccccgattctcacccagatccgcaaacctacgaactcgatcctacctgtttagtacgtagataagtgccaggtgggggacaccgaaaccggcagttccaatcgccgacagtcctaaatcgcaatatcacgacagaacctcatcctccggtcttgaaccggtctgcgccccagaaaatccaacctattttttagaatgatcgacaaagtttatcaagccgatatacccggtgatgaacactccaaaacacacagataagcatacaacatatacacacatactccataagtcatcctaccccacaatctccaagtgatagccatggggagagacccgaaaccgtagaatcgatctgcgatgacatctcaatccaaatctgccttgatcaccgcgatcgccttgaatacgatcatccgatatcgctgtcgtcatgcgctcctccacacaaggtcaaggtcgatcgtcacgccatccggggagacgggagactggcaatctacggtagtggtatgtaagctggatattagacaatggaattacctatattgtacatctagcttgcaagtatgtgggactgtattgatgctccatgggaattcaatcgggattcgtcactcaagcattccccttcccacttttccttgcccactatgctgatcaatcccattattctggcatgcagacccgcgcacagggcgggtacgtcgatcctggatggggggaaaaagcaaaactagtcccaccaccgaaaggggacgaggtagagagaaatggaaatagaaatgtaaataacaacggcaagggaaaagaaagtgaagggaatgagtatacgcaatagtaaagctcgattcgggcgtggagatcctccggactccctccgttatcagttggagcctcgttcagttgtacgcggggaagtcctctttccatccgattcagccctcagggtacctattttaggcaaaatatcggcgaactagtgatatctatttctattccccgcacccacacatatcgttatgtaagatcactagtagtgggtgaggggagatgaaatacttttatagttattatattaccctattattcataccctctggaatactttccagggtaaggcagtaagtagcgtacgagtccgagtctggacgcgcccgtccctttcagcccacacccccttgctacataagctcagcagttgctactggctgtacgacatccaagttccaacacggtgtgagtcatgacgtgacgtgctcacggcccagctggggaataaccaagttggaagctgaaagcgaaagcgcgtaggaaagtcaaaaagaaaagtgacaggccaactggcaacaagggatcggctcttgttttgcgctccgtttccaatcgcgctgtcttttgtctgaaacccctatcgagaggtgtcattggtcgagacaagatggagttaatttagttacctagttacgttatacgttgcaaagggaaggcgatctgatacttcaatatataagtatggtacagttgtatgccattgtgtctcaaggtgacatttctttatgcttggcaggtctcgatgcgggggagtagtttcacaatggagaatccggggtagggttggcttgagtaacattccacaaaacccaggaatgctaggaggtcattgcgggtgcggttactctgtggaatatacagcggggtgtagactacataggtttcccaaacacacatgctaaagaaagtgcaaccctaatcagctcggaggttttgccagcgcttacctcacatcctatcaccactcactctccttattgccccaactccggacgatcagcgctccacaccttctagaacaaactacctcgcagcacccaatcagcgtcacgaatggcctcacactgatatcaccctatgcggggccgctattccgcgatcaggccattggtggaaagacggtcgattacactatcttacaatctctgtcctattatctggagaacatgtgatattctggggaatagatagcgaaacgaagagaaaagagaaagtcgaggcggggaaaaagggcacgataccgcgtccagttcccggtgaagccccggacacccctccaattccaacatcccacgtcgagggggagaacgaaaaaattttctcttccaactccactgagcgatttatcgtcatttcttaccccatattcgcctaacgttggataatgcaacccactcgcggatgcggttcacaatgcccctgtcgcaagatccacattgggcacaggtgttgtgtgtacggagtaccgtcttgaaggcgctataaccaggtaccatatgcaggagatcagttagtctgagatgaggcagatcctagcttggatttgcattccgtaaggcactagagaaacaggggtaagggaaaacaaaggtgcggagtacgctgtggctaccataacgggcgcataccccgagctaattaagcgaattcgagctccaaaccagcgcgactctcgctggcacgtgtacctatgatattatcctttgttagatccttgactattggaaacgggatcaaaagtataactgcgggagctccggactcttgtcttccctattgggagtatcataaagcgggggggtctagatctgcacggacaggatagttagtttgtagcttgtggatttcacatgtgaatgcgcgaatcgtatgttttgatctcgttggcttcgagcttggaatgcgggatgtggaggtctgataagagtaagagttacaggaatgcgcccatatgcgcccataggtgcatgactgccttggttttgctgtgcatgccttgcattgtgcaagtgttagctacggagtaccttcgggagtaacgaggcgatggcgtcattgaaggggggccatgtgttttctccagatttggtacggagcgcattgataagggattggacgtattcaacacgtcgtctctgatctgggaagggctatcttactaaggatgtggtatgtggatgacgacagagctcatagcctagatcatgcaggtaccacaacatcagtccatagaccatagggctagctggctggacagcgacaaccgggtgatctcggaggacgacatggtgacattctcgcaggtttagggcatccagttgcggggcttagtgccgatatgggaatctcccctccgctttacatattaggaaggtctgccatggcttggctctccattttcgcctatagacggagctgtgtactttgtgggggatagtgcgagactctatacagcactactccgataccctcgatggcaaatttggcaaattcaaggaaatcaaattttcacggagcaaccgctgagttgagtatgtaaccgcaattcaaaaaggggctcggtgagacttcaatttccttttccccgctggagcctcccgatttacgcaactcgggcgagattctttcggcatcgccgtgccgattcgggctctttggtcgctttgcctggccgccgtgccggtttttgtctgacgccggacacgcgtattgcagtggtactctccacactgtccacacctattcttatcgtcccatacggtaagtgccgtaccagcgttggtgcctctccttttgagaaccatgaccgctggaatgccgccacaccccgagattcctccgaggctcggaagttgggagtctggggtgagccgtgggatgatctgcatgagtagcgaatgcaggtaatccactagggtctcccccgtctaatcgcattgcatttctctgcattctattctggtggatggagtcctgcgtactccgcaagcctcgggatgggagagcctcgggatagcgggatttcttcggatattgggaggtaattcttgtatcctgcttctccgggttttgtatacccagtctactccgcatgtagcggtgaggccccagtgtttcaagtctgataggtaggttgtggagatcgatgaaaatttgctgtctgtatttgcctcttgaggaaatatcaaatttaacaacgcaactattgaaagcaaattcgatggtgtcgaataccgtctaaatatactagccaatatccaaacttggagggtccaacgtaactaatgcgcaacgctaccaatttcatgaatgcatgctcgtttgatattaacgaaaataagcattctactgatgtcatttataaccagtcacctcttggcttctataagcaactttttttgtagccctaatcttaacaatttgccctatcaaaaccctaatctggcgtcctcattctatatcgagactcgaccaaaagcatgagcatatagtggtaatccaattggcatcagatagatgtccattccatattgagattcggacgcatcagtctatgacacgtcggctggtaagtttctgctagaagtctttatttccaagtattatcttctcttcttctcactcaactgatacatggcgttctgctctttgtttccgctcatcccatttcttataccatgccttctaaactacgttagtcaatccccccgaatgttgtaaagggggtgctggacgctacccaaagatccctcatacggattcttgcagaggccaaggcctcaggctagatgaggcgcaacttgaatatatgccgcctcaagctagctagtcagtattttctccgctataaggagaattatgagcgatcataaagatcatactaggtatgtcatgcaaatatctcccttccctctgtccaaatctaattctataaacagtataacgcagcattcttgcagagtacccctccataaccacggatatactgtacagcgatgatggggtgactgaaggacctctacacgcacagaggtacaggcttgatgggacaccagcttcctcccccgagcaccgatctaggggcctggtgccacaaatatccctcaagtaccccgggccaagcccgaataggcactggtcgtcgggactcctcatactttctcttgtagcggtggtataacttgccgactgcccaaccggaggcgacatccacgatgctcgccacccaacttggagccttcgcctcctctacaaggatccgtacaagggatctttgtgtggcatccaggactcccttcacagcatccggggggatcgactaacgtagcttggcggacatggtataagaacgtggatgagcggaaacaagaaagcagaccgtcatgtatcagctggggacccgaggaggagaagagagaaaggaagagacggagactcgagggaatttactgttaggactagctaccagcgtatcctgaaaatggaggttcgaattagagtggaggtccccagcgtaggtcatgcaattcagtagactaatcgctaaggttctaaatctcatgtgcgcggtgtatatatacccctagcgcttacttagcaagtacgtcggcccatacaggccagttgtataagtgaccctcggggtcgtaacattacccccctcctttgtgagctgcgtcctcgaagctcttggcatttcctttgagaggcacttctttaaatgtgcgttctttatctcagtatagcgacctcttcgccagaaaatgcgctataatagtaactcctaacttcctcttctaccctccgctatatccaactataacccttaggtcttcactgggaatcctgctgcggcctggtatatacaatgtataaatcggatcagcgctaatcatatatatatctgtatatcttacacgggatctcagggtactaaatatacctattacataagccttcggtaggtttatattatggtatagaggtcctacttcttcgtatagggcgttactaacctattaggttaatctatacctagatacgattgtaaatcgggctatcctagtaccttctacgattagatctcagtaatatactcgaaaagacctagttagctatttctgtagtacgcggctggtacttatataatctatctcctataggcttataccccctaatatacctacccttaggctatcactgctactagctaggtagttaccccttcctccggctcctctactatcttctctataggcccctatatcttacttgatatactcctagcggtccgttataccttagatataggctcctatatagaatactattatagcctaggtagtaatcctaggatttacaggaagtatagtgatataggaaggggattatcgaccttcgaccctctaggtagcgatatatcctttactataatacttaggccttatttctatatatctttagttaatagcctacctatagtagtggctataacgcctctatatactatattgtccctaggctatttatactagactcttagccctacctcctatacctactattatataccttctgtattatattcctaccgatatatactgcttcttacagtatcttcgcggtcttaacttatcttcttcttctttataggttacccccttttagcttttataggtagtcttacgcgctcttcttttttaaactgatctaatatagtagtttcttctatatacacctaaggttcctatatattcttagtatctctatagcctttctatttaactaggtactctgcccctttatagcggcttttaaggatatattctataatatannnnnnnnnnnnnnnnnnnnncttactattatatctaagtagactattatctagccttatattctaggctgtgccttctaggtagccgccctagccctattagtctatttctataagtttcttttacactaaggtatctcttatctataccttatatataaagtcccccctaaacaaaaaacatttgtgcagaggcggccatttctggcctcaaagggggccgaaagtggcctcctcggcacagttcttccgcacacgcactttcggtcccagagccacgcgctcctcgcctgccccttgtaacgtgcaccgtcacgttcttgttcgggtcatgttggtacctgggcgcgtggctccccttcccctgccctcgagccccgctcctgctttccatcgacttctagccacctccgggcctgctccttgagcgctaccatgacacctccgttttgtgaggtcgccaaaaatggcacactccatcccaggctcattggtcgctggggcaatggggtccatgactataaagctgccaacagtccctcctcactctcctacctagccctcctctcacctatcctttgccagtccctccctcagcgcgtgcctcacagccgttcgtcatccccgttgatttgtctacctgcctggagcggcttcgcgcacatcttagttttcccaaacgcagcatgagcgacgttacaaatctattctctgcgaccgatagtgacacttccggggagtctttccagcctgacatcgatgcgaccgatgactccgattctgggcaagcctcaaattcaaccgagctgacaactccggaacccacctgtcttcctgacaattgtaacaggccttccacccgtccaaaacgacccgtgcgtcgtccagcggacgctggtgttctgcccgatttcagcgatgaccctgatgacgacacggacgaggacattgcaaacataccacttgattatgggcgctcagaacaaaccaaggttcggggtcgacgaatagaaaagcgctgggacaagtgagcatttattcagacctacgcaattgggaggcgattactgatgtgaggcgtaggtactgccgagtgaaggctgctcaggctggtgcgctgttgaaatgggatgatccagtggaggcactacgcgaggttactcctaatgatgtgcatcgttttttcaactactgcatgaagctgaagtatggcgaaggcggtcgtcatctgaagggaacatcgaaagcgagcgccctgaaagctgattggaaaggatttcggggttactatcggagaattacacggaccaggataactgccgaagatagcgaagagatcaatgcggtaagttattcctcttagtctgacgctcggagctgactgggttctagggcattcggaaactcgtcgataaattcgacctcgatacacaagaacggggcaaggagccggtgtacgtccaagacttgactgaattgaacgagacgatcctccgaactcaggaaagacgatttcattttggatacgagcgaatccagctctgtctcttcaacatgctcggtatttataccgtgaaccgtctgcatgctcttctttcgctacagttccaccatctacgtttctccatacaagataatccggacgggggccctcccgtacttttagtagagatcaaatcggagtatataaagcaattcctcagaacttcctaagtgtatgtatcgtgcgttgaacccgggtaatgatgatcccaatattaacactacttcttagtaacaattttcctttccctgaaatcatcaacgatccgtcgcttgtcttcagccctcatacatttatatttggtatacttctttggctccaagccttcgaagtccctacgctttcctccatggagcgcctccgaaagctgttcgtccaaggtggccgacaacagatggaactacccttgaagcgcgaagtcgaaggctattatgtcttctgcaagacagacgtgatcaatggacgtgcggttcttcaatggaaccagccgatgacagagggcgccatgtctggacgcctgagaaatctgggggaaatccacggcttccttcagtcaatgttcgcccatcgttttcgctatggaggggggaagatgttaaacgaaagcagcgcggtcagcgaagcacagcaaaatctgatcatgaaacacgctgacacccgcactttcttgaatcattatcttccacgacacatcgacaccgatatgcagaacgttatgaacggccgcgaatctaacaagtctctgatgcgcgcgatcacccggatgagtaggtggattgacaagagacgccctcggcatcttacttcggagcaacgagcgtcccttcgcgaacatccagaatatgtcgaggccactcggcgaatgaaagagcaagccgaggagtgcaaatacaatcctagtacagcaatacaatcgcgattagagaaattgacccacgaaacctccaatacattcagccagttagaaagagtactaagacagaaggtacactataagttcgactgtaaacaggccgttatagacattaagcgacagctctcaggagctactattaataacgaagaggcgaagaaggttctttaagtagaagaccagatactaccggagtagattgatcttcttaagaaattattcatatagcctacctctctatccctagaggcagagtggcaaagaaggaacgctactatagctacaatctcccaatactgttatttccttaaaggtaggccattgcgtaggcaacgcaaacgggctataccaagtgacgggttcgataaagaacaggccagtatattactagattcagccaagaagggttgcagctctccggagccttcgcagcaggatattcttcttgtgaaagccaaaaattatatcaaaaaggccaagaagccccgccgatgttttcaatgttatggtgacaccgaacttccaattcatcgccgcacgcagaaatatagcgaatataagtcgactctacgacactttcgagagaagcacttgcaggatcgaaggtgtcatatgtgtgacgaagatctgctacatgagatgcatcttcgcaggcatgcagaagaggttcatcgcctcagtactgaacggaattactacgccaaagaagacacgggatcggacattgataccgattaatcgggaggcttgcaggttttctgtcaaatttaagaactctatcctttttttctttgcttggccgtttccagtcttcgagttaaacgtccaccctccctgtcttcggcagcagtctggccctcccatgtagccttacacaatagtgatgcaccataaacgccagcaagttacacgtcattcttataagctagtggctccaggaactaaccaaaattccccggagctttagggctgctagcaggatatcataattaagcaaaagcccctttgggtggaagagattccaatttaggctagaagaatcccgtctgttcgcctcttcctagcattgcgtttccctatttcctggctgcagagtaccgttcccaggagattgcggaacgggacatggagaagagtaatccccagagtatacaaactcacagcgacgaccgaagacttcctcatcaatactctcgatcatcgctggctcaagggcctttcttggaaaagaaccttaaaaggcctggtgaattgagaactgcttttatttttaccaacgaaaaatgaacgacatcagattgcaggactctgcgcaattgttagggattggaacaatctttgtctaaaagacggcaacttaattatgatatgcaaccgcattatgtagagagtattcagagatagaaagatatcaaggcggttcaatagtaagatagtagagagagcacagattttcttcgatattctttttacagaagaggattcctctggctctttatagttatcggctaggccctggctctgctttcagtcaccgtctagcgtccgcagcgctgttatattgtcgcccaatgaaagctactgcggagacccgctcctacagcaagctggtaaggaagtaaaaccaatcctcactgggacaacgtggctgtctagctgagaaccgtcatctaatatgggcgactgcgaggtctcacacaaatacgggacactcacgctctatttcccagcgctcccagcgccccactcagatcgcgctaagctgaattgggtcggggaaagccattgttttctgggacatgatctgggaaacctttgcaagcaacaaatcatgcatcctctccagacgcgccaattcattctttgctacacaacaacgtggaataccacaatattagtttccactttgcatgtgtctctgtacatgtacaatgaatctccgaactgggccctagtctctactcgggactacacgtggctccagaatgggtcccgtgactttctaggtaccgctgaagtatgattggctctgttgtccttgtagaattgcactctggaccacagccacattttagcgcctgctcccctctttctttcgcctctccacgggaaaatgcatgtatgaaaggctcgcaagaagctatgtagagtgccaacctcgcgcttacaatgtccaagtcaagttctagtttccgtgacatatcatgccttgagatacagttacaatgcaggccgaaagatttaggtcagttaaaggagtctcatgcagtagcaatgtacgttcttggaccccgcattcactttggcgcctcggcaaagacttgggaacgcaccgcctgggaactctccatcctcttttcatttttatgcgttgcgtaagtcaccaaaagggaagaagataacatgggggccaacgcagcatctacaacggtccaagatgaagctgctcatcaatccaacgaagggaggagcagaggggaagagctttcatctaggacacgcgcgttctggagccgagagacgtgagtatgtcagtcttgaaatcgaagatggatgctgactgcagatttaaaagttttactggttccgcaatcttcaacctacttgccttcgccccacccgccggnnnnnnnnnnnnnnnnnnnnnnnnnnnnnnnnnnnnnnnnnnnnnnnnnnnnnnnnnnnnnnnnnnnnnnnnnnnnnnnnnnnnnnnnnnnnnnnnnnnnnnnnnnnnnnnnnnnnnnnnnnnnnnnnnnnnnnnnnnnnnnnnnnnnnnnnnnnnnnnnnnnnnnnnnnnnnnnnnnnnnnnnnnnnnnnnnnnnnnnnnnnnnnnnnnnnnnnnnnnnnnnnnnnnnnnnnnnnnnnnnnnnnnnnnnnnnnnnnnnnnnnnnnnnnnnnnnnnnnnnnnnnnnnnnnnnnnnnnnnnnnnnnnnnnnnnnnnnnnnnnnnnnnnnnnnnnnnnnnnnnnnnnnnnnnnnnnnnnnnnnnnnnnnnnnnnnnnnnnnnnnnnnnnnnnnnnnnnnnnnnnnnnnnnnnnnnnnnnnnnnnnnnnnnnnnnnnnnnnnnnnnnnnnnnnnnnnnnnnnnnnnnnnnnnnnnnnnnnnnnnnnnnnnnnnnnnnnnnnnnnnnnnnnnnnnnnnnnnnnnnnnnnnnnnnnnnnnnnnnnnnnnnnnnnnnnnnnnnnnnnnnnnnnnnnnnnnnnnnnnnnnnnnnnnnnnnnnnnnnnnnnnnnnnnnnnnnnnnnnnnnnnnnnnnnnnnnnnnnnnnnnnnnnnnnnnnnnnnnnnnnnnnnnnnnnnnnnnnnnnnnnnnnnnnnnnnnnnnnnnnnnnnnnnnnnnnnnnnnnnnnnnnnnnnnnnnnnnnnnnnnnnnnnnnnnnnnnnnnnnnnnnnnnnnnnnnnnnnnnnnnnnnnnnnnnnnnnnnnnnnnnnnnnnnnnnnnnnnnnnnnnnnnnnnnnnnnnnnnnnnnnnnnnnnnnnnnnnnnnnnnnnnnnnnnnnnnnnnnnnnnnnnnnnnnnnnnnnnnnnnnnnnnnnnnnnnnnnnnnnnnnnnnnnnnnnnnnnnnnnnnnnnnnnnnnnnnnnnnnnnnnnnnnnnnnnnnnnnnnnnnnnnnnnnnnnnnnnnnnnnnnnnnnnnnnnnnnnnnnnnnnnnnnnnnnnnnnnnnnnnnnnnnnnnnnnnnnnnnnnnnnnnnnnnnnnnnnnnnnnnnnnnnnnnnnnnnnnnnnnnnnnnnnnnnnnnnnnnnnnnnnnnnnnnnnnnnnnnnnnnnnnnnnnnnnnnnnnnnnnnnnnnnnnnnnnnnnnnnnnnnnnnnnnnnnnnnnnnnnnnnnnnnnnnnnnnnnnnnnnnnnnnnnnnnnnnnnnnnnnnnnnnnnnnnnnnnnnnnnnnnnnnnnnnnnnnnnnnnnnnnnnnnnnnnnnnnnnnnnnnnnnnnnnnnnnnnnnnnnnnnnnnnnnnnnnnnnnnnnnnnnnnnnnnnnnnnnnnnnnnnnnnnnnnnnnnnnnnnnnnnnnnnnnnnnnnnnnnnnnnnnnnnnnnnnnnnnnnnnnnnnnnnnnnnnnnnnnnnnnnnnnnnnnnnnnnnnnnnnnnnnnnnnnnnnnnnnnnnnnnnnnnnnnnnnnnnnnnnnnnnnnnnnnnnnnnnnnnnnnnnnnnnnnnnnnnnnnnnnnnnnnnnnnnnnnnnnnnnnnnnnnnnnnnnnnnnnnnnnnnnnnnnnnnnnnnnnnnnnnnnnnnnnnnnnnnnnnnnnnnnnnnnnnnnnnnnnnnnnnnnnnnnnnnnnnnnnnnnnnnnnnnnnnnnnnnnnnnnnnnnnnnnnnnnnnnnnnnnnnnnnnnnnnnnnnnnnnnnnnnnnnnnnnnnnnnnnnnnnnnnnnnnnnnnnnnnnnnnnnnnnnnnnnnnnnnnnnnnnnnnnnnnnnnnnnnnnnnnnnnnnnnnnnnnnnnnnnnnnnnnnnnnnnnnnnnnnnnnnnnnnnnnnnnnnnnnnnnnnnnnnnnnnnnnnnnnnnnnnnnnnnnnnnnnnnnnnnnnnnnnnnnnnnnnnnnnnnnnnnnnnnnnnnnnnnnnnnnnnnnnnnnnnnnnnnnnnnnnnnnnnnnnnnnnnnnnnnnnnnnnnnnnnnnnnnnnnnnnnnnnnnnnnnnnnnnnnnnnnnnnnnnnnnnnnnnnnnnnnnnnnnnnnnnnnnnnnnnnnnnnnnnnnnnnnnnnnnnnnnnnnnnnnnnnnnnnnnnnnnnnnnnnnnnnnnnnnnnnnnnnnnnnnnnnnnnnnnnnnnnnnnnnnnnnnnnnnnnnnnnnnnnnnnnnnnnnnnnnnnnnnnnnnnnnnnnnnnnnnnnnnnnnnnnnnnnnnnnnnnnnnnnnnnnnnnnnnnnnnnnnnnnnnnnnnnnnnnnnnnnnnnnnnnnnnnnnnnnnnnnnnnnnnnnnnnnnnnnnnnnnnnnnnnnnnnnnnnnnnnnnnnnnnnnnnnnnnnnnnnnnnnnnnnnnnnnnnnnnnnnnnnnnnnnnnnnnnnnnnnnnnnnnnnnnnnnnnnnnnnnnnnnnnnnnnnnnnnnnnnnnnnnnnnnnnnnnnnnnnnnnnnnnnnnnnnnnnnnnnnnnnnnnnnnnnnnnnnnnnnnnnnnnnnnnnnnnnnnnnnnnnnnnnnnnnnnnnnnnnnnnnnnnnnnnnnnnnnnnnnnnnnnnnnnnnnnnnnnnnnnnnnnnnnnnnnnnnnnnnnnnnnnnnnnnnnnnnnnnnnnnnnnnnnnnnnnnnnnnnnnnnnnnnnnnnnnnnnnnnnnnnnnnnnnnnnnnnnnnnnnnnnnnnnnnnnnnnnnnnnnnnnnnnnnnnnnnnnnnnnnnnnnnnnnnnnnnnnnnnnnnnnnnnnnnnnnnnnnnnnnnnnnnnnnnnnnnnnnnnnnnnnnnnnnnnnnnnnnnnnnnnnnnnnnnnnnnnnnnnnnnnnnnnnnnnnnnnnnnnnnnnnnnnnnnnnnnnnnnnnnnnnnnnnnnnnnnnnnnnnnnnnnnnnnnnnnnnnnnnnnnnnnnnnnnnnnnnnnnnnnnnnnnnnnnnnnnnnnnnnnnnnnnnnnnnnnnnnnnnnnnnnnnnnnnnnnnnnnnnnnnnnnnnnnnnnnnnnnnnnnnnnnnnnnnnnnnnnnnnnnnnnnnnnnnnnnnnnnnnnnnnnnnnnnnnnnnnnnnnnnnnnnnnnnnnnnnnnnnnnnnnnnnnnnnnnnnnnnnnnnnnnnnnnnnnnnnnnnnnnnnnnnnnnnnnnnnnnnnnnnnnnnnnnnnnnnnnnnnnnnnnnnnnnnnnnnnnnnnnnnnnnnnnnnnnnnnnnnnnnnnnnnnnnnnnnnnnnnnnnnnnnnnnnnnnnnnnnnnnnnnnnnnnnnnnnnnnnnnnnnnnnnnnnnnnnnnnnnnnnnnnnnnnnnnnnnnnnnnnnnnnnnnnnnnnnnnnnnnnnnnnnnnnnnnnnnnnnnnnnnnnnnnnnnnnnnnnnnnnnnnnnnnnnnnnnnnnnnnnnnnnnnnnnnnnnnnnnnnnnnnnnnnnnnnnnnnnnnnnnnnnnnnnnnnnnnnnnnnnnnnnnnnnnnnnnnnnnnnnnnnnnnnnnnnnnnnnnnnnnnnnnnnnnnnnnnnnnnnnnnnnnnnnnnnnnnnnnnnnnnnnnnnnnnnnnnnnnnnnnnnnnnnnnnnnnnnnnnnnnnnnnnnnnnnnnnnnnnnnnnnnnnnnnnnnnnnnnnnnnnnnnnnnnnnnnnnnnnnnnnnnnnnnnnnnnnnnnnnnnnnnnnnnnnnnnnnnnnnnnnnnnnnnnnnnnnnnnnnnnnnnnnnnnnnnnnnnnnnnnnnnnnnnnnnnnnnnnnnnnnnnnnnnnnnnnnnnnnnnnnnnnnnnnnnnnnnnnnnnnnnnnnnnnnnnnnnnnnnnnnnnnnnnnnnnnnnnnnnnnnnnnnnnnnnnnnnnnnnnnnnnnnnnnnnnnnnnnnnnnnnnnnnnnnnnnnnnnnnnnnnnnnnnnnnnnnnnnnnnnnnnnnnnnnnnnnnnnnnnnnnnnnnnnnnnnnntatccagatgacaagtctagtatggtcggatacgttaacgtgattgactgtgattttgatccacacgacccggaaaatgagtgttcagagcactacgatggatcgctcaggaattgtctgacatctgtcttccagtttgctctgtcttgtgagaatctgaatactggagaacaacaatggggagactgggggatggaacgtcctgggaaagtgatttatacagatggacattcttcactcgtcgaggaggaagacgttttcctttgtccgtccgattacgatcttttctctcgttcctgctatcctagcgagccgagaaaagagacgatcacggagtctcagtatcatgagcttcagagatctatcatctaggatagtcaagtaacttgtgtttgatttgtaacatcacaaatgactggtccatcacaaacttcgtatttcaaactggatcattcgtatatttagtgcaaaaatatacatgttgtgatagaaattgtttagatacttatcggcagactaactgagttcttcaagctcgagatcagccatgtaaatctctcccacgtggctctccagagtttccagagcatggcggacctcctgagcctgggcattccacataacgctagcctccggattgtgagtccatttattgcgcatttgctcaatcgcggtgttaacaaacctgcgacccgtctctagcattttattcgttctctgtttgaaaaaccggtcccaacagtctgcaaggtcgacgtccttgcccttctgtgctttatatgcctttgctgcgcggttcaattcactgcgaatgccgtcgttgaccattttgaaccgttctaagactctcggcatgttttggtagttgtagaccgcaatagtctacagtagaattcgaaatcagttttaactctacactcttgcgacttgattcgcgaactctaatccgaaacacactagctcatatttggaataacgttcgatccatgacttccaaaaatagacattgtattttacataacgcgggtaggactctgccttgtgtatattactcgtaaattccatacaatggtatttctctgccataccgcccactccagacaggaggcatcttcacccgtctatctctctggaatctcacaatgacctcacaaaatagctccgagactcccaccatccaagctacatctcatccgcgacataatagagagccagtcactgagcaaagctaaaatggccgaagaagcagaatgcagcaagttcacaatcataaatattcgcagaaacttacaacagttcggcagcatccacgcacccccaactcgcataggtcggaaaccaaccacaacaccgctaataatagacgcgctctgcgaccacctgtcggaaaaccgggcctgtacctcgatgagatgtctgtcttcctctaggatgagtctcgcacgatgatcacaacatctagtatcagaagagcccgacagcatgtaaaagagcgcaataccgatttacgagaactatatctccataatttatcggacttcagtcgcatcgtctagtttatatggatgaatcgagatgtgataagagggctgggtttcggcggacaggctggtcaccacttggcgtagcccctttacaggtatcgcagttacatcgcgaccagcgatatcagagtctacctacgtatacgcaggacgggatcgtcccctcgcgtgtatttcgcggtgcaactgacagcgctgtcttcgaaggctttttagctcagcttcttcagcactgcggacgatggccggagccttaatctgatgtggttatggataatgcgtcattccaacactcagagcgggtctcgcagatgtgcgcggagggggggggcgtgaaactggtatatctgccactctagtcgccgggcttgaatctgatcgaggagttttttgctgagctgaaaagctttatcaaacgtaactggagtcactacaagtggatcccgatcaagggtatgatgtttttcttgcttggtgtattgacacggtcggtgcaaagcaagagagtgctagaggccactttcgacacaggcttgaggatagacgtctgcgaaacttgaacaaattaactatgactttagccagatagaagaggtgatacagtatagtatttccggacatcggtgtcaccccctacactcttccgttgttccccactaaactactttcgaagatttctcagccgcacttgttttggtgatgctacataagttaccggattatcgtattagcgagtcaaatgtttactacctataaggcgagaagctgcaacctgagtgccccacgtcaacctttccatccctcatatggctgacttggttggcactcccactgtggccccgtgaagatcaattccgacgagttaggcagaccgcttttagtaaatgctttcgacttgacgagctcctcaagcacaaacgtaaagacactgccacccatgactgggccatatttcagacctagcagcagccaggtcttgaagccgaggtgagctagaaggggtactccccggttgttcgctcgcccaacctaggcggagagcaagctgatttacattttcatgtgtattcttgagacaaggctccatggtttctttggaaaataatactgatatatcattagttgatgataattctgaagctgatgattggacaaaagatctatgacccacaagctttcgtgacatctcctattgaaacgtatcgtaatagaacaaggggcactaattcgggggctcttctcgtgattgggctcgccgtgcgttgctgccaacacctggttggccacctccccctgtccccgcaacttgatatgaacttgaaggagcgcttttttgatctacttacaaggacacttcccctccaaatctgcttgaggctagttctatatgaccacgagctactccagacgcgaacttaagtcagtttatcttggatactcattcttcttgataatgtctactctttacggaagcgattcctccaaggaaccaaatgcctacgactactgcaatgatgcaactgctttgcctttacgccatcttcaaatgagcgaaagtatctccgcgcccaacacgttctcaaactttgcacatatacacccttcgcctataccatttgagacaaacttttgccttccccagttgtcagcttatccgtgggctccttatttgacaatgccgaaatgttcgctcgagatgactgtcggtgcttacgcaaacccttctacattcagtagtcaggctgtaaatagcgcgttgtccgacacctggtctacaaataatatgttgacgagagatgctcaagatctgtccgcggagagcactgaaccccttggaagcaggtatgtctccaatttatcctttcatggcaaatcgccaactgcctcgtcctaggaatataaaaagaaacaacgaattcaagtgtggttggaagaattgtaccagctctggaggattcgcatctaaatcctctctcatgcgacatattgaatcgctgcacgtttctccacgtggcttcgcatgccctcattgcagaaaatcctttaacaggaaggatcagctccaggcacacagaagcattgtacatgttggccgggactaactggcgcgtctcaaacgcaggggtagtgcgtcataacatgagttgaagattgttcagtactgcaaatttattatgctagagagggactagcagccaaacaatgtaccgcacaagtaaaatcgaaattggctttaatattcaatgaaaatcgcagtgaataacagtagccacaacaagaaaaagcatctttgtctaccagggtcagttctctgtgtaaacaatgcagctttctttttgatgtcaaaggtgtgtgagcgaaggctgtgtgtgacaaatagcccaagcaagatatgagagaatgaaagaagatcttgccagattgttaggattcccttttgtttgatctgtttgcacgatggattctatcggttttttacaagaaattgcggtactacaacaatgactcattatgcttaccagggaatacaatacagccctacatggattaacaggggaagagctagacttagattggcgtgtctccacttaaggtccgggaattaaatcagaagagtttagagttaaaactgatttcgaattccactatagcaaatcccagtcagtcatgtagctttcattttgtgttgtgacgcaacctacatcgcgtattagagtcaatgccttgcgaggatcctcatcctggaccatccccggccactttaatggatttcctggaactggatttaagctccaaagctaaacatgatttgttttaatacttgtccatggtgagtttgcagcggaaagagatgatacttacatcacctttgatcacattgatactctgtcggagcagtcggaatacttccttattggatttgcttccaaactgttccatgacgcgatcaataggacgtttcactagcccttcttgcgacattctggggatttgttctatctacttcccctggatttgacaacacgcggccattttgagctaacgaatggttgtgggaatgcggctgagccctcggagaaactcaacccttcatacagatggtgcttcattctggcatataacatatcctttttctttcctttattggtatctcaatggttacgcgaagccctctcatttggcccttagtcaaccacgttcatgctcgcaactaacacagcggacgggcgaagacatgcgttgatacaataccggtgggagaaacgacttctttacaaacgacttatccgccccactaaatgctagccatgctcacacctgctcagtgagcgggtgagatgatttgcgggtgaaattctgggggatgctgggaaatacatgtgaccatgttccctggcagcttggtgtttcgggaagacccatttgaaaaatgcgggggctcaagttacagtagtattcgaaatcagatttacctctacactcttagactttcattcccgaatcctgatctaaaacacgctaatcaaaatacagtatagacgtcgacccccttgttccaagcatagatcttgtatcttacataacgtagtggaacggcaccgactgtattttccatgaagattgctatacgcgggctctcttctctggtttctcccaggcaaacgctttttactctaccgtaactttctgagcatcatctaaagtgagactcatcatgtggccccgaaacttcgccctcacaatggcatcttctccgcgatataattgagagccagtcactaaccacatcctaaacggccgaagaagccgaatgcaaaaaagtcatgatcatgaatgttcgtagaagcatgcggcatttcggaagcgtccgcgactttaaccccaagctcgaatagaccagaggctggctgtgcctcaatgagatggttgcctgtctttgagaatattcagaacgccgtagagtttattagcatattccacagaatctagggccatacaaactatcatcttctccagagcccttctttcaaaaagatattagaaagcagaggaaggaaagaaaattgacattttgacatctgctatacacgaaatcctatgaaagagatctgccctgacgcgtggcccaaggcaagtaaactgccatttgtcgcggaacaactaggccgataaccaggaggaagccataatatattttttcccatctagctttatccactgcttttgctcgatgaggatgtcttgattcctatgaactgaattggaaacacgcttttcacagcagaactgaatgtgaaggtcgcccaagttagtgattagatatgaaccatcctcagaaaattcaagataatcgatgtatccgttgacattaagcgtcttctctagggcacccgtcgcagggtcccagagctttacagtcttatcccaagaaccagaggctagcagtcgtccgtcgggcgagaaggccactgactccaccgattttgaatggccctcgagagtctgttccagagtatgctgcaacgcgtccgtcgctgggtcccagagccgtacagtcctatcagtagagccagaggctagtagccggccgtcgggcgagaaggccactgaatcaactagacacgaatggccattgagagtccactttcgcagccccgtcgttggatcccagagtcgtacagtcttgtcccaagagccagaggctagcagctggccgtccggtgagaagaccactgaattaactggagctaagtggccctcgagagtctgctccagcgcgcccgtatttaggtgccagagctgtatagcccaattactcgagccagaggctatgagccggctatcaggtgagaaggccactgacttgactagacctgaatcgtgtttgagagtacgttgtagcgcgccagtcgccgggtcccagagccgtacagtcctatcagtagagccagaggctagcatccggccgtcgggcgagaaggctactgagttgaccggacctgggtggcattcgagggtctgctgcagcgcacccgtttccgggtcccagagccgtatagtcttatcccaagagccagaggctagcagttggccgtcgggcgagaagaccactgagtcaatcggtcctgagtggccctcaagggtctgctgcagcgcgccagtcgccggatcccagaactgtatagtccaattactagagccagaggctagtagctggctattaggcgaaaaggctactgaatcgaccggacttgagtggccctcgagaatctgtagctctggactccaggtttcctgtacctgtggtagccgagaacaccaattgggtaggtatgtcttaaaatatcttcgaattatcgcctttctcggtgtaaacataagtccggagcagtaaagttgaaggggtgcaacctcggctatctggcggcttttctgcatgaagcgctttgcgtcatgcagaaattcggatattggggaatcaccggtgtcctatacttgttaagttaattttattgtgtgtgacaactttcataggaactcacagctgagactctttgtaatagactaatgctccccaaaacatcagatacatagcctaggatgctcattgattccacccagtgcaaaaaatgctccttcagaaataacagtgccttagatatcataaaatgtaggtccttactccgcacgaggtgatgcacccaatagcgacaggagtattgtaactctgcgctgatagagttgtggatagtctcgggactaatctccgcacatgttgtcccatcacttggtagaccacatatattctttctcagatcgtcacatataccaaggcaacgtgtagtcaacttctgttgtgtctcttcctcatctacccagaaaggagtttcgtctcgcatctctagatcaagaaggaagtcccgaaatgatagatgaaaggtgcgtaatggtaaattaatatcctctggtacactcaaaactgagtgtagcgatttcagcctgaggctaacccgcctctcagggagaccaattagtcttgaaagcgaggtaactggtagtggactttcaagcatcacgatcgcaccaatgacagtttgaaattcctcgaccagttgtttttcctgtttcttgctctgtcctttaagaagtcgatttaacacaggaagatacgtccctttgaattttgatccatcactccgatgtgtgagaatctctgccagactatcgaccggatcccattgagggtcctcaaatatgcggcacacggtagcagcaaagataaatagtggtactgataatgcaatgagagcctgtaaatctctgtctccaggccagtcaattggtagaggctgaatcttccgaatctgtccaagtctgtgattcaagaagagcgatatatcatgtgttgtcacagcctcgggaatctgatgaagagcgaggtcccggtagtcatcatttttcatctccgaaaaccctagacgaatagggagttctggtcgactggtcaagaagatccgtaagcccagagcatttgaatgctgtagatgaggtagtaattggagtatggctcgtatgtcatcgtcttgttcacattcgtccaatgcgtctatcacgattaccacggtccgtatcagatgattggattgttctaatttcctgattggtcgaagtagtagattgtcgaattgttgcttaagtgacttcatcccaatgtcgggctcgtcatagatcgcttcttgaaggccaggtattagttgagagatgttcttcgccatttgtcttgacacagtgggaaacagcttcattgcattccctctatcagcctcgcccctcctgaaaaaaaagcttgctcctagcaaattttcctgtttgaagtgtttggccactgtgcgggagacggtcgatttccctgtcccagccatcccctttaaccagaagatacattttccctgtggtgacatagcccattccgtaatgttattgagaaggtcagtcctagttcctagaaggcattcatcttcatgccggtccatataagagtcgaactcagccccatgcgcaataggtaacttgtccagagggtctgcattcgatcaataaagtcccccgagttgaattttgctataatgtacctgcgttgagactgaactgagcattgattgtgccattattgatggctgtttgcattccagaattatggtcatgaaaagatgtcgtagacgccatgattatgataacaccatagcattgttcggtattcaggaggaacatatgggcggggtagtagtaatagtggggtagcctcgacctatcgtcatgtgatgcctcattctccatttggcggatggggatttcaaactgcgcgcgagctagttaatctcacttcattttacgtgatccagcatatacattatttctattagatgtcaaattagtgtagacgaaggctgtgtgacgaagataccaagcaaggaaggcaagggcagaaggaaatcctaatgatctggaagtttgatctgcttacattcgagaacttccatcagcttccaccgatcattacgatactagaacgatgacgcattaattgttactagtggttaccatacagtcctacaggggaatgtctaaaattatactggcgtgcttcaagctagggttcgggaatgaaagcctaagagtgtagaggtaaatctgatttcgaatatcactgtactgccagctgggaaaataacagacgttataaatctaaagctcgattgcatgacccaagttatctcacatccatagcttagatacttcggtctactgaaagactctgcaagagggctgatcaacgatgtaatattgtgtcatgtttcatgaagaggacaagcacagcagttttaaggcaaaatacacgctgatcaaaatttgcagggatgaaatctgttctgagagggcgaggaatatgacacgtcttgattaacagcagatagccacatttgctgctgatatagcaagtatatttatttatcccatattcgtggccaggatgctgtcaaagtcaagaaatttgaggggcatctagattattaattgtatgagtatttccaataaatttcatagcagctcaccatttgacttgttacaatacagacacacacacacacacacacaattttgttacaatacagacgcgctcgaaatcagtttcatctctttactgtcttcaattcttttttgaactctattttgcataataccttaccatataaggttagcctgtccctgacccacatctcaggcagtatctcagtacagtaatgaatgattgcctaaaaatagcggttgtatcattgttgtattctccccaccctgtctagaaccagtcacttacaaacaaaccaaacaagccaaacagactagttaacaagagatttgcttgttgtctggctactctgcatcccccatatatccaccttggctcaactgccctctttcacaccccaccgaacactggctgagagaacttatactgagatacgaaactggtgggtagacgtttctttgcgaatccgctcactcacacgtactggcgccacaactgcactatggccacccttctatggtcacagttttgttttgatccgcacaagcgatagtggtagcccccacgctcccagctgatgtcgtggtagagttgcttggcgttggttttaatctgacgcctctcaccagattctcatttctttctagaacatatggatcccttcagcattaccgtcggtgctcttggcatcacacaattcgctatatctagcatcggtaacctgcgcgaatttatcaatggccttgacgaagcaaaggatgtgatgcaggatgtgacatctgatttggaagccatacagcttccgctctatgcgctcgagaatctccagatccctgatgataagacatatgttgcagcgaaagcagatctggagaacactggtgttgctgaagccgtgaataaatgtgggcaggcatgcgcggattttactaagaggcttgagcagtggacaaaacattccaccacaacgaaattttctctcagagatcgattgtcggtaggtttatggaacaaagaaaagatccggacctttaggacacaggtccgttcttgtcaagccatcgtccaatttgcaatcgacagcactcagttgtacgtgaaacgtctttgcgctagagaagaggcgctaattaagagcttgaagaattatcctgatccggtccgaaaatgcgtctaaaactgcacgccaagagacagagaaacaactgcgatttctcgaaaatactattcaggagcacatcaacattacaaagagaaagcaagacgaagctcttcagcgcaagaacgcgctcgaaaaccctgaggatgaagatgaggacgatgacggcggagctcagcgaactctcgccatccaagagaccaaagagcaggcacgtttgctagaaagtgaccaagctgcctctggaattgtttcccagatactcttgaaattgtccatcccggtggtcggcaatacatatgaggttactttttcaggtagtcacaatagcggcatgcagatcggccatagtacgggtactatcaactggaatggcagtcgtacctaaaggagggtcatctgtcggatatgtctacagatgatgaatcgaaacgccatccttagggaccttatcagcgtctggcgtctgtttataacttatgtcgcatgttacaatgcgctttggattctcctccatagcttcctagaccttgtgacctgcagctataatttagtctatattgctatgcagttgacgtaaactagcgattttgtcctttaatcactatcgagccgactgtttgactgacagattaaggtgatagcctacttgagacacgaatttgtcacccaaaggtgagcttcgttccaagagagcttcccataagagccgagccatctcattctctacggcttctaggaatgatgcttcgtcgtcatttgatgcgaccagcaggggctctgacatttcaagttggtgtcaagaaacagggtaatactgtctttttaccatgtaaacatgtgactttttcactatgtatttgcttactaattgtgtccgaccagattgtcaaaaccggacaattgttgtttttagttagagaattgtaccattgcgaattttacccgtacgttcgccatacaccaaatttccgtcatatattatgacatgtatagtagatcagagatagttgccctttcggcttacgggcgttaatatattgtgtgtgtaccatgaaaaattgaattctccatgctcacccttgctcacccttctgcccagtgagcgaaaagaaatgatttttgattgagggtgggggatgctggggttttgggaaatgcacgtgaccctgggtctcgtagttcccaggagctcggttgcttctacaaggacgattgaaaactgcgcgggccctcatttattgatatcatagatgctagcttacgtgcctattcttttcctttgagggctaggccactcactgccaagcgcgtatttttgaatggttaatagatccagagagcagttgtatgactcaattaatcttcctaatactgaaatgccctgtaagagacctcattaacgatgatgtaaaattgtgttctcaatatgcatagcacataaatagaggtaaatgaagattaaaagcgagagagggaactgagttccgagagggagaggaataatatacgacttgaaggacagcagattgccacagttgttgcaaatatagcaaacagagaggaggaggccgggcgatactcagcaggcaaccataggaggttgactccgttatgggttacccaggaaaagtcgctattcaatccaaagccacgtatttctgggacggactttgaaaggttggaagcggatgtgacaaatgcatcgcttcggatattgactgtaccgattgtcgtatgtagaaaattatggtcgtgtttataaaattgaacaaagccaggagagttgatcagaagtgtccattcgcactggccggtggccgaatcccagatcctgactgtcttatcatccgagactgatgcgagtcgacttccacaagcagaccatccaatagagctgacggtatcactatggccctcgagattcaatttacactgaccggtggagggatccaagatccttattgtgtcatccaaagacgccaatgcgagtcggcttccatcttgcgaccaggcaatagacctgaaccaaccactgtgcccctcgagagttgatacgcagtgacctgtggcaggatcccagatcctgactgtgttgtcaaatgatgtagatgcaactcggcttccatcttgtgaccaggcaaccgagttgacctgccggctatgaccctcgagcgtcgatgtgcaatggccggtgatcggattccagatcctgactgtcttatcccaagaagctgatgcaagttggcttccatcttgtgaccagactattgacgtaacctcgtcgctatgccgctcgagggttgatgcgctgtgactggttgctggatcccagatcttgactgttttgtcagcggaggctgatgcgagctgtcttccatcctgcgaccagctaaatgagctaaccggagcactatgcccttcgagggttgaggtgcactggccggttgctggatcccagatcctgactgttttatcaattgacgctgatgcgagtcggcttccatcttgcgaccaggcaaccaagcggaccgaatttctatgccccttaaggattgaggtgcactgaccggtgatcgggttccagaccctgactatcttatcgtttgaccatgttgcgagtcgatttcccccccgtgaccagacgatcgacataacctcgtcgctatggcccttgaggattgacgcgctgtgaccggttgctggatcccaaatcctgactgttttgtcagccgaggctgatgcgagctgtcttccatcttgcgaccagctaactgagctcactgaggcactatgaccctcgagatgtaaaatacactggccagtgaccggatcccagatcctaactatgctatcccgggacgccgatgcaagtcggcttccatcttgtgaccaggtaatccaggtcaccggaccaccatatccctcgctatgaaatttctcaacggtgaatatacacctgctggtggccagatcccatattttggctgtcttatcctcagacattgatgcgagtcggcttccatcttgcgaccaagcaatcgctatgaccgatttactatgcccttcaagggttgacgcgcactgacctgtggttggatcccagatcttgactgtcttatcatgggatgccgatgcaagtcggcctccacctggggaccacgtaatcgagttgacagaactactgtgcccttcgagtgttgacgtgcactgtccagtggttggatcccagatcctgactgtattatcagatgaggctgatgcgagtcggcttctatctttcgaccagtcaatcgagttgacctgatgacaatgcccttcgagcgtttgaaggcatggactccaatggttatcggccactggctcattcaaaacccaacttggactctcgttttgataacgtttccttgtgatactctgcagtgggctgaagataagggatgaacagtacagctgaagggggctattctgaatcaccagcctgtggtaacggatgaatcgggaagcgtcccgaacttgatgtaaaagggcctgtggctccccccttttctattttagccatttcactgttagaagtggagataccgtttacataattgaagacttacctgaagtaatccctccagcctcaacatacctactataccttgacagaggtttcctagaatgctaagggcttccagccagtgaaggtacttttgtcgtaggaaaacatccacaagccctccctcatcgaggctaggatcgccgctttcatggtagctgccgtcctgtaaatgatctatccaataaacacaagcgtattgtgcatgtgctaatggattcgtgctaggctgtccaactttatcaattgtgaatccaggaaaattgatttgcaagatatcacggcgaagtgtctggaacatgacttgaaaagaccgcaggaaaattgcctggtgtccagcttccttccctctgggaaagatctcgtcttgggcctcactgagtagatattccttcgcagactgatgaacaaaaatgatagtgtcatcgcgtaatgtcagaaatgagccacaagtcgatatgatctctgacaggatttcattatcacttaggaggtcattaggtaattcaataatggaggccagttcttgaaatgcaatagggcgatacactatcgacatactagccagaatttgcttgcagagttcggcatcttccgagttgcgaacctgatcgatcatccgaccatacaacgcattaagtccaggaggaaatgcctccagcttcttaagagcgtgcctccgcgatgttctatcgaggtcttgacagactaaggctacccaaaggaaagtgccttgcgagttgagtgacaagtaatggcatatcgtatctcgagtttcgtcgctgtattttttaactctcgccagatggtgaaccttatgttgaatgaatttgcccacggcttcagatactaacaactcattcagctctaatgagatcggagtggtctggatagtgtcaagacgctcttcgatatcggaccagttgcggctcgagacaatccactttacttgtgggtaagcagatgatatctgagcaaccaagtcgagaaggggaagtaggcccgatgtgcactcatccagcgcatcgataatcaaataggtgctctgtagggccgggtctttcagaatgtctgtaaaaatcctcgagagggcattccatgcgtttatgtcctcaaacaatgcttttcccgctttatcataccgtcgctgcacatgagagagaagaagtagctgcttctcgacaagcgaatatatcaagccacggagaacagcggtggcattattgattcgcacgtctgttgcttggcaaaagaagaacgagatattcgcagtgtctctaaataactgtattaacttatcgatgataccgtagaggagcattgtcttgcctttgcccggattgcctctaatctagaggagagagttgctagcgttatctcgccattgttgaaactcatcgttgtcgagaacccagcagtatgaatctttgagcagccctccgttggtgttctgaatacggtctttgtcatgtttaggatcagtcgtccgtagatcccgcaagcacgcttgattccatgatgtttccgattgtacttgggtatcacaccgattagtcacgctcctttatagttatgcgttccactcacggaactgattagtgatatgaccaagattctgtccaacttggaacccagagtttgaactgtcatatgatgtcgtatatgccatttttgcagccaggtgattcttagaaggggcagtcgcgagcatatggctaagtcgttgtagtaccttgtaccccgctatcaggtgatctatcaagcgacactaggaagcagagactggtagttttggttcaggctcctcaatctgtcgagacgcaatacgtataatttacttcattggggaactttagtcacttcggctaatgtttattaatccaccttgcacaagaatgactgctgtcaatattggagtggtgactcgcgaggggcgtcgagataaaggtatcaatcgtatgtttatttccaataaattactgagtagctcatcatgtaaattgaagttacaatacgtttcgatacactcagctggcctaaacctaacgcatactagcgtgtttcaggataaagtttggtaaagaacgaaagagagtaactaaagtggtgaaactgatttcgagcgcgtctgtacatttcggatccgtcctgtatgtatctatctgaacccaaaatcgaacagaggcgaattccgagacgagggatagatactgaacgaaggtggttgatattaccttcgatatatatattcagctgtggttgtgtgccgagcgggaactaaccccggaccgacgatggacccacctatggaagggcccgaaccccctcccacaaacacccaagaaacccccaccagcttctccgtggaagatttccagcccagagtaaacatcggatcccccgaatcccctaccgaaagccgtaagcgaacacgcagcggtgatgcgtttgcaccatcggaaaactcgggtcgagtgaccaccaaggaggtgtggaaactcatcggaaccctgaaagacattatccgccatcaaactgcggtcatcgaatccactcagaacgaactacgggagattaaacacaatcaacatgtcctgcaagaacagaacgagaagctccatgaggaagtgaaagcgttacgagcacaggttgaaagcgcccctgcagtcaccgcgactaggacttgggcagcagtcgcagccactggcgataatgccacaccctcgctgagccaccagaaacccgagaaagagcaaaactgcgtccgaatcagcacccagagagcctttgtagacccaagagataatgacaacaacgacggaaacgcgtttgggcgatatctccccacagataccgtcaacacccacatccgcacagcattgcagagcgacgctgcaacacaagacgcccaagtggtaggaattggcaccaccaaaaccggctatctcattcgattcaagaacgtggagtcggctcaggtggctcgcaacaacactgagtggctacataaattgggcaacaacacgaagctggttaaaccacggttcggcattgtagtgcaccgcgctccaactgacgaatttgacctggaaactggtactgcccaagcagcagtaaaaatcatccaagagaacgacctggcagaacacggtttccacatcgaagaactggcctggatgaaagcgaaggacaaggccctagggaaattcgcatcgttaggaatctggtttgactccgcagaaggagcagaacatatgctccgtagcggtttcgttgtcagtcaacactacatccctcaggtagagcgatgcgagatcaagaaaaagagatgtttccggtgtcaacggtttggacacctggcatggtcatgcaaggaaaccccgcggtgcggacactgtgcaggtcaacacgagcggcagcgctgcccaccaggaatcagggcccgctgcctcgactgtgggggtgagcacgccaccggagatcgacgatgtctaacccccgcgacctctcaccccaaccgatgttagagagcaacctacgcatccttcagttgaatatcatgaaatcaggaccaagaatggaagcactcatcaatgaccaccaaagccaagacctggatatccttctgatccaggagccatcgatcacaacctaccgcacacatgtcaaccacagcgcctggcgactatatcgacccaccacacagaccgacgcagttcggtttcgcagcctcatctacgtgaacagacggatctccacctcctcacaccgtcaagttccctgcaatcacccagatgtcgtagccatcaagatctggacgaccgactctcaaactcttttcttttctgtctacatacctccagtaccgctctttacggtcgatgacgcgtcagcaatgccggtgctcactgcaatagcaaacaccatcacagccgctgtacagaacgagcaacgctctacaagcgtcattatcacgggcgacttcaaccgacatcatccgatgtggggcggtaatcgatccaatgtggggcaacaactatatcgctcctagattcattgaagacgccagcgacctgatcgatttcttccaagcccacaacctccacagttgtctccctcgagggacggcgacttactgggcattcaacaactctagacagaactcgaccattgaccagacggtgacagataacccggacttgctcatcaaatgctatctgtatcacgaaaactatggatccgaccaccgtgccacctatccagaatggaaccttcaactccggagcaggccaaacaccaaagcaaggaaggcgtatgagcgcgcggactggactaggatcggcgaggaagtagtccgacagatgaacccatggaagcagatcaagacccggccaacactcgaccgggtagtggaaaaccttacagcggtgacggcccaggcggtcgaccggttcacacccgacacacgcccgacgccatactccaagcgatggttcacgccagatcttaagacccaacaagtcgaagtcaaccaactgcgtaggaggtggcaggcaaactgcgccgagctgggaagagagcacgctaacaccacggctgccttcgaagctatgcagcagaaacgacgagcgtggacgaggaccatcgagaaagccaagtcctcgcactggaagcagttcctagacgaagctggtgaagggaagctctggaaggccgcgacatacatgaagccccgagagacatggggttgtgtcccagcactgcgagtgggctcggacgattgcacccaaaatgaagacaaagcgagggcattcatggatgcgttcttccccgccatgaatacacccgaaatcagcccacccaccgcaacggagacggaacttcagtggcatccgattactgaattggagatcgagcgatcactgaaagcagctaaagggaatactgcacccggggaagataacttaccgatgctggtctggaagaagctttggaagtatctaaaggtctttattgtgagcatcttcacagtgtgtatagagctaggacaccacccgagacagtggaggagcgcgaaaatcatcgtcttacggaaaccaggcaagcctgattactcggcccctggtgcttaccgcccaatctcacttttgaacacacttggcaagctcctggaggcagtaatggcccgacggttatcctatgtggcggagaaacacagcctgctaccaaacagccagttcggcggacggccgggtaggaccaccgagcaagctctactagtgctgtccagtgcgatcgacaaagcctggtacaagcacaaggtggtgaccctaatcgccttcgacctcaaaggtgccttcaacggagtcaataagacaagcctggatgcgtcgctgcaggcaagacggatcccgattgtggccagaaaatggatcgcaagcttcatgagcgaccggcacgccaacattgggtttgacgacttccgcactgagactgctccgctggtgaacgctgggctagctcaaggatcaccactttcccccatcttgtttgcattcttcaacgccgacctagtcgaccagcccgtcgactcccagggaggtgcgtcggcattcattgacgactacttccgatggagaggnnnnnnnnnnnnnnnnnnnnnnnnnnnnnnnnnnnnnnnnnnnnnnnnnnnnnnnnnnnnnnnnnnnnnnnnnnnnnnnnnnnnnnnnnnnnnnnnnnnnnnnnnnnnnnnnnnnnnnnnnnnnnnnnnnnnnnnnnnnnnnnnnnnnnnnnnnnnnnnnnnnnnnnnnnnnnnnnnnnnnnnnnnnnnnnnnnnnnnnnnnnnnnnnnnnnnnnnnnnnnnnnnnnnnnnnnnnnnnnnnnnnnnnnnnnnnnnnnnnnnnnnnnnnnnnnnnnnnnnnnnnnnnnnnnnnnnnnnnnnnnnnnnnnnnnnnnnnnnnnnnnnnnnnnnnnnnnnnnnnnnnnnnnnnnnnnnnnnnnnnnnnnnnnnnnnnnnnnnnnnnnnnnnnnnnnnnnnnnnnnnnnnnnnnnnnnnnnnnnnnnnnnnnnnnnnnnnnnnnnnnnnnnnnnnnnnnnnnnnnnnnnnnnnnnnnnnnnnnnnnnnnnnnnnnnnnnnnnnnnnnnnnnnnnnnnnnnnnnnnnnnnnnnnnnnnnnnnnnnnnnnnnnnnnnnnnnnnnnnnnnnnnnnnnnnnnnnnnnnnnnnnnnnnnnnnnnnnnnnnnnnnnnnnnnnnnnnnnnnnnnnnnnnnnnnnnnnnnnnnnnnnnnnnnnnnnnnnnnnnnnnnnnnnnnnnnnnnnnnnnnnnnnnnnnnnnnnnnnnnnnnnnnnnnnnnnnnnnnnnnnnnnnnnnnnnnnnnnnnnnnnnnnnnnnnnnnnnnnnnnnnnnnnnnnnggcagatacgacagctctaccaggcatgtatcgcacctatagtagactacgcatcgacggtctagcatgacccgcttagagacaaagttcacatccgacacttgaacacagttcagagaaacgtgctgatcagaatcctgtcggcgttcaggacggtagcaaccgcgaccctagaggttgaagcctatatactccccacgcaccttcgccttcgccaccgagcgcagcgcacgattgcgagactgcacactctacctcgcgaccatcccatttggagtgctctgtcaagagcccagaaccgtaggaacaatgtcggatcatacgcccgcttcccattagcagaagcgctgaagaccatggacgttgacaggctcaacgaactggagatgattgacccacgcccgctaccaccgtggcgaaaggacgccttcacagagattgagcttgaacccgaccgagagacagcgagagatagggcggtgtccgcaaaggacacgtcaaacatcgtcgtctactcagacgcctccgggcgtgagggccatctaggagccgctatcgtggccctgaacgacaatgatgaggtgacggaatcccaacaggtgcaagtggggtcgatggaacggtggtcggttcatgtagcggaactcataggcatcttctacgcggtcagcacggtattcaagttggctcaccaacgcacgagcgtcggaaatcatatacacgtaacagcaacaatcctttgtgatagcagatccgctttgcaagcaatccagaatgtgaagaatagatcggggcaacgaataacccacgcaatcctccaagcagccaccgaggttcaagcagggcatattgccctccgtcttcagtggatgccgggacattgtggaaacgtcgggaacgagaccgcggatcgactcgccaaagaagccgcacaaccgggcaaaacccatcctttccggccgctgctgacgagagagaacgcctttctccgcagcaagacccatgctcagtgggagcaggagtggaagtcaagcaccaaaggtgcgcacctacggaaggtggacggcgcgctaccagcgaggtacaccaggaaaatgtacggaagcttgcccaggaaccgagcatacctgctcactcagctgcgcacgggccacaactggttatccacttacgccaagaaatttggcttccgggacgatgatcgatgcgagtgcggcgcgcaggagacggtcagccacgtgttgctggaatgtccaaaactacgagacttgcggatagaattaagaagaaatgttggggacgcgttgaacagcgtgtcgagtctgctgggaggctcaaacgaaggtgtgagaggtaagccagacaccgtctcgagggcgaagacggttcaggccgtattggacttcgccgaggcgtcacagaggtttcgcagtcgtgcgccacaagggcagcctaacagcgggagcggcaataggccagggcaggccgtgacgaggctctaagattcagtcagaaagtggatcactctacatgtacatactcggatatatagtcgttgtatactgcatatcgctttgcgaggggtcagtgtaaatgaattctactactactactactactactacgtctgtacatttcaatgacttgaaatttgctaaatcaaaaacagactagcgtgtttcaggatttattttgggaaagaatcgaagagaataaagtggtgaaactgatttcgagcgcgtctgtacttactccttcggaccttgcaaattgctgaaagcccgataaattctcatttggggatgagtccttgggatctgtcaatatcgaacaatttggctcagatggtccacacccccattgctgcatgaagccttcctcctgggacatgttgtaattcccttattaacgcaggccaaacaataaagaggcaaggaaaacgagtgtggggaggggaggctagtgtacaaaaatgatgggacgcctaggtgcgcagcacctgagcagggaaagccaaagctttgggggggggggaacgtcggggacaaaggagacggaagatgggactggggggagcgaccaatttaaggccaaggtgggggcaaggcgcgcgcctggaggaagggagggggaaatgctaaatcgaaggttctagtctccaagcagcgaccgcaagtggcttgtggtcgcagagtcaggcggttttgaatcgcgaagttggacatccaataggctttccccacgcacctccactaccgcaacaagtcgacttcatacataaacttcgaggaagataaaataatttctctggacgcttcagcaccatttgtggcacggccactctcacactggaagtctctggtcgtaaagaaaggcctctcgagaaaggagaaaacggttctacgtcagtgtggagacgatttggacgatctcagatccacaagacccataactcctttttagctatttttagcttggtcaaggtacccataaagccagaccaaaggccttcagcttgaaagagtatatctgcctaaagtagcatacccaaagtgtgccacaagcaaaaaagtatgcctatatcattcacttactatatttaggcgcatcccaagcaggcgcgcttcttctgatagagcccgtcctgggacagaccacggttttccctcctcgaagctatcccaagtagggttgcttcttctgatagagtccgtcctgggacagaccacggttcttcccctccttctacactatcccaaatagggttgcttcttctgatagagtccgtcctgggacgggccacggttttccctccttctacactatcgcatgcagatggaccccaggaagcaccaaactctccgcattacagtaaagcaactgcgaaatgcagaagggagaagttgacactttgccagttaggatgttgctttgtttgtgctgtttgttgcgtttgcgtggaatcttcttggtagtctagccttctaattataggctcttatatctgtcttacaatctacagtcatgttgcatgagtatttgcacccaagtacttcggaagccccacttttcttctgccggttaaaccctctcattgaaaaatatatagctaactagctagtaacaagtatgccaaccttcacatatacgctcacgaacgtatggtggaagctctggactggggaaaaaaagggtagtaacctttataatactatagtataatacgcgcatgtcggatagggtttatactagtagtaataagcaggcggtaaaaaagggcggtcaaagatggaggtactggggtgcgaatactcatgcaacgccactgtataaaaaggaattgggattattacgagtatgtacaaaacgggtatatttactgcatcatgtgctttcctcaaaacataatcaatagtcgcggcaactctatgctcaggctctagattgccgcagccttcaatttcaaacatcctaagaagtttctccacatttttctcggcgatctgtcgggttcccgtgaggttatccgtttcaaatctgagatactgtaactttataattgcgcatccctcataatattttagtcgatggagggcgaggctgtttgttcggtggccaagaaggttttcgcttgcttccattctcttaatatgttttgttttgctttaaaggaaagaggacaatagtctatccgaaagaatagaaaggacggccataataatttaaatgtacctacgacactgaaacccgtgtcgcgcttttgccgcacccccgagccctccggtatggcccggctctccagtgtctctagtgcgtccctactctctagtacgtccctactctctagtgtgtccctactctccagtgcgtcccgactctctagtacgtccctactctctaagccccccgcaggagtataggttccggcaggagtataggttcccgcaggagtgtaggttcccgcaggagtgtatgttcccgcaggattaagcctcccgcaggagtgtaggttcccgcaggagtatgttcccgcaggattaagcctcccgcaggagtataggttcccgcaggattaagcctcccgcaggattgagcctcctgcaggattgagcctcccgcaggagtataggttcccgcgggagtgtaggttcccgcaggattgagcctcccgtagaagtgtattgattacctgttcaagatcccacgagtagggccctcgcgttccttggaccatattcgaccgtatgacccatggcatggtccctaggcacactactgattgctcccagagtaggaatcataattcccggaagatatacagctcctaggattgaaatgtatagctccggggaacgaaaggtggtaccctaggagcttcgctcttactttctccgcctgagagacggacttataccgtcattcctccgactaagcggacgaaaagggggaccagatctttgtaatttactgggaagggatcctaggcgcctataagacacccctcttaggacatgcgtagacctatatggcttgaaataagagcgtactactgataagacgtatggcaccccgcgagaaatctaataggagtggtactgggatgagagactgcttttgtcactatgatagagctatgtagagtatcctagaggtggtaatacgaaaggaaattgataacagataaagactatttttagctagcttatttcaaaagtgagggtcacttagaaggctgaggataagagacctctcaaaataggtacctactcgtgatagaatcctcttgagaggaaattcgtcacagtatgtcccacagaagagccccagcaacatagaagggaaaacgttatatgagctggctcttggtactactcctctcctagtccacttattctaggtttaatccagtctcgggatagtctagaggcgaccagggaatacgcacgacggttctcagccagatacccatgctgtcctagtgagggctggtgtcattggcttatcagctgaaaggtgggtccccgcagtggcctttgatgcggcgatcgaggatggcactaacacgatatttatgacattcggcgacgatctggctgtgagtgaaaaggcggcggattcgatcacacgtgcactcaaagccgatagtgatcataatcggccgacaagaccccggcagaagatgataaataatgcacttgagatctaggtcaaaatacctgtgacccatatagaccgtagtcagaagaccgaggacccttatggccactaagccagggtggccgccagttgccagctctaaagcctatctagactaggggctgtggacgtatgtccaatgtggacctgcgtccacggctgtcggtaattggccttgagtcaactgttctggatcacggggcctagaaccaaggccttgcggtcgcagctccctaaccacggacgcacatctccaggcctgggactaggggggacgccagttggcagccagagggctcgccaggatcatgggccatggtcgtacgaccagataggacttagacctatgaaccctaggaacaagatgtggggctcccgggaatgccgatcgagttccccggaaccaaccacagcccaggaacgccagacgcgctcctaggcatggatcaagtgatcccagaaacacctcgtgtcctcgaggaactctaagtctgatccctaggagcgaccaagagcgtgcctaggaaccatactatagatcctaggaatgagagtcctggtaagggggtctagaatacatagctataaccaattttagaaatacaaattttagaacgcgggcaataagagcggcaacagaaagaaggcctaatcattgaatattattagccaagcggcactctacctcaaatctcagcccccttccgtactgtagggggaactactggcttggatttgatgcctgtggaatctgacataaaagttggcatgccatggaggattttttctaggttggtaggatgaaataattcttacaccagactttgggggggggggggggggccgggggattaggnnnnnnnnnnnnnnnnnnnnnnnnnnnnnnnnnnnnnnnnnnnnnnnnnnnnnnnnnnnnnnnnnnnnnnnnnnnnnnnnnnnnnnnnnnnnnnnnnnnnnnnnnnnnnnnnnnnnnnnnnnnnnnnnnnnnnnnnnnnnnnnnnnnnnnnnnnnnnnnnnnnnnnnnnnnnnnnnnnnnnnnnnnnnnnnnnnnnnnnnnnnnnnnnnnnnnnnnnnnnnnnnnnnnnnnnnnnnnnnnnnnnnnnnnnnnnnnnnnnnnnnnnnnnnnnnnnnnnnnnnnnnnnnnnnnnnnnnnnnnnnnnnnnnnnnnnnnnnnnnnnnnnnnnnnnnnnnnnnnnnnnnnnnnnnnnnnnnnnnnnnnnnnnnnnnnnnnnnnnnnnnnnnnnnnnnnnnnnnnnnnnnnnnnnnnnnnnnnnnnnnnnnnnnnnnnnnnnnnnnnnnnnnnnnnnnnnnnnnnnnnnnnnnnnnnnnnnnnnnnnnnnnnnnnnnnnnnnnnnnnnnnnnnnnnnnnnnnnnnnnnnnnnnnnnnnnnnnnnnnnnnnnnnnnnnnnnnnnnnnnnnnnnnnnnnnnnnnnnnnnnnnnnnnnnnnnnnnnnnnnnnnnnnnnnnnnnnnnnnnnnnnnnnnnnnnnnnnnnnnnnnnnnnnnnnnnnnnnnnnnnnnnnnnnnnnnnnnnnnnnnnnnnnnnnnnnnnnnnnnnnnnnnnnnnnnnnnnnnnnnnnnnnnnnnnnnnnnnnnnnnnnnnnnnnnnnnnnnnnnnnnnnnnnnnnnnnnnnnnnnnnnnnnnnnnnnnnnnnnnnnnnnnnnnnnnnnnnnnnnnnnnnnnnnnnnnnnnnnnnnnnnnnnnnnnnnnnnnnnnnnnnnnnnnnnnnnnnnnnnnnnnnnnnnnnnnnnnnnnnnnnnnnnnnnnnnnnnnnnnnnnnnnnnnnnnnnnnnnnnnnnnnnnnnnnnnnnnnnnnnnnnnnnnnnnnnnnnnnnnnnnnnnnnnnnnnnnnnnnnnnnnnnnnnnnnnnnnnnnnnnnnnnnnnnnnnnnnnnnnnnnnnnnnnnnnnnnnnnnnnnnnnnnnnnnnnnnnnnnnnnnnnnnnnnnnnnnnnnnnnnnnnnnnnnnnnnnnnnnnnnnnnnnnnnnnnnnnnnnnnnnnnnnnnnnnnnnnnnnnnnnnnnnnnnnnnnnnnnnnnnnnnnnnnnnnnnnnnnnnnnnnnnnnnnnnnnnnnnnnnnnnnnnnnnnnnnnnnnnnnnnnnnnnnnnnnnnnnnnnnnnnnnnnnnnnnnnnnnnnnnnnnnnnnnnnnnnnnnnnnnnnnnnnnnnnnnnnnnnnnnnnnnnnnnnnnnnnnnnnnnnnnnnnnnnnnnnnnnnnnnnnnnnnnnnnnnnnnnnnnnnnnnnnnnnnnnnnnnnnnnnnnnnnnnnnnnnnnnnnnnnnnnnnnnnnnnnnnnnnnnnnnnnnnnnnnnnnnnnnnnnnnnnnnnnnnnnnnnnnnnnnnnnnnnnnnnnnnnnnnnnnnnnnnnnnnnnnnnnnnnnnnnnnnnnnnnnnnnnnnnnnnnnnnnnnnnnnnnnnnnnnnnnnnnnnnnnnnnnnnnnnnnnnnnnnnnnnnnnnnnnnnnnnnnnnnnnnnnnnnnnnnnnnnnnnnnnnnnnnnnnnnnnnnnnnnnnnnnnnnnnnnnnnnnnnnnnnnnnnnnnnnnnnnnnnnnnnnnnnnnnnnnnnnnnnnnnnnnnnnnnnnnnnnnnnnnnnnnnnnnnnnnnnnnnnnnnnnnnnnnnnnnnnnnnnnnnnnnnnnnnnnnnnnnnnnnnnnnnnnnnnnnnnnnnnnnnnnnnnnnnnnnnnnnnnnnnnnnnnnnnnnnnnnnnnnnnnnnnnnnnnnnnnnnnnnnnnnnnnnnnnnnnnnnnnnnnnnnnnnnnnnnnnnnnnnnnnnnnnnnnnnnnnnnnnnnnnnnnnnnnnnnnnnnnnnnnnnnnnnnnnnnnnnnnnnnnnnnnnnnnnnnnnnnnnnnnnnnnnnnnnnnnnnnnnnnnnnnnnnnnnnnnnnnnnnnnnnnnnnnnnnnnnnnnnnnnnnnnnnnnnnnnnnnnnnnnnnnnnnnnnnnnnnnnnnnnnnnnnnnnnnnnnnnnnnnnnnnnnnnnnnnnnnnnnnnnnnnnnnnnnnnnnnnnnnnnnnnnnnnnnnnnnnnnnnnnnnnnnnnnnnnnnnnnnnnnnnnnnnnnnnnnnnnnnnnnnnnnnnnnnnnnnnnnnnnnnnnnnnnnnnnnnnnnnnnnnnnnnnnnnnnnnnnnnnnnnnnnnnnnnnnnnnnnnnnnnnnnnnnnnnnnnnnnnnnnnnnnnnnnnnnnnnnnnnnnnnnnnnnnnnnnnnnnnnnnnnnnnnnnnnnnnnnnnnnnnnnnnnnnnnnnnnnnnnnnnnnnnnnnnnnnnnnnnnnnnnnnnnnnnnnnnnnnnnnnnnnnnnnnnnnnnnnnnnnnnnnnnnnnnnnnnnnnnnnnnnnnnnnnnnnnnnnnnnnnnnnnnnnnnnnnnnnnnnnnnnnnnnnnnnnnnnnnnnnnnnnnnnnnnnnnnnnnnnnnnnnnnnnnnnnnnnnnnnnnnnnnnnnnnnnnnnnnnnnnnnnnnnnnnnnnnnnnnnnnnnnnnnnnnnnnnnnnnnnnnnnnnnnnnnnnnnnnnnnnnnnnnnnnnnnnnnnnnnnnnnnnnnnnnnnnnnnnnnnnnnnnnnnnnnnnnnnnnnnnnnnnnnnnnnnnnnnnnnnnnnnnnnnnnnnnnnnnnnnnnnnnnnnnnnnnnnnnnnnnnnnnnnnnnnnnnnnnnnnnnnnnnnnnnnnnnnnnnnnnnnnnnnnnnnnnnnnnnnnnnnnnnnnnnnnnnnnnnnnnnnnnnnnnnnnnnnnnnnnnnnnnnnnnnnnnnnnnnnnnnnnnnnnnnnnnnnnnnnnnnnnnnnnnnnnnnnnnnnnnnnnnnnnnnnnnnnnnnnnnnnnnnnnnnnnnnnnnnnnnnnnnnnnnnnnnnnnnnnnnnnnnnnnnnnnnnnnnnnnnnnnnnnnnnnnnnnnnnnnnnnnnnnnnnnnnnnnnnnnnnnnnnnnnnnnnnnnnnnnnnnnnnnnnnnnnnnnnnnnnnnnnnnnnnnnnnnnnnnnnnnnnnnnnnnnnnnnnnnnnnnnnnnnnnnnnnnnnnnnnnnnnnnnnnnnnnnnnnnnnnnnnnnnnnnnnnnnnnnnnnnnnnnnnnnnnnnnnnnnnnnnnnnnnnnnnnnnnnnnnnnnnnnnnnnnnnnnnnnnnnnnnnnnnnnnnnnnnnnnnnnnnnnnnnnnnnnnnnnnnnnnnnnnnnnnnnnnnnnnnnnnnnnnnnnnnnnnnnnnnnnnnnnnnnnnnnnnnnnnnnnnnnnnnnnnnnnnnnnnnnnnnnnnnnnnnnnnnnnnnnnnnnnnnnnnnnnnnnnnnnnnnnnnnnnnnnnnnnnnnnnnnnnnnnnnnnnnnnnnnnnnnnnnnnnnnnnnnnnnnnnnnnnnnnnnnnnnnnnnnnnnnnnnnnnnnnnnnnnnnnnnnnnnnnnnnnnnnnnnnnnnnnnnnnnnnnnnnnnnnnnnnnnnnnnnnnnnnnnnnnnnnnnnnnnnnnnnnnnnnnnnnnnnnnnnnnnnnnnnnnnnnnnnnnnnnnnnnnnnnnnnnnnnnnnnnnnnnnnnnnnnnnnnnnnnnnnnnnnnnnnnnnnnnnnnnnnnnnnnnnnnnnnnnnnnnnnnnnnnnnnnnnnnnnnnnnnnnnnnnnnnnnnnnnnnnnnnnnnnnnnnnnnnnnnnnnnnnnnnnnnnnnnnnnnnnnnnnnnnnnnnnnnnnnnnnnnnnnnnnnnnnnnnnnnnnnnnnnnnnnnnnnnnnnnnnnnnnnnnnnnnnnnnnnnnnnnnnnnnnnnnnnnnnnnnnnnnnnnnnnnnnnnnnnnnnnnnnnnnnnnnnnnnnnnnnnnnnnnnnnnnnnnnnnnnnnnnnnnnnnnnnnnnnnnnnnnnnnnnnnnnnnnnnnnnnnnnnnnnnnnnnnnnnnnnnnnnnnnnnnnnnnnnnnnnnnnnnnnnnnnnnnnnnnnnnnnnnnnnnnnnnnnnnnnnnnnnnnnnnnnnnnnnnnnnnnnnnnnnnnnnnnnnnnnnnnnnnnnnnnnnnnnnnnnnnnnnnnnnnnnnnnnnnnnnnnnnnnnnnnnnnnnnnnnnnnnnnnnnnnnnnnnnnnnnnnnnnnnnnnnnnnnnnnnnnnnnnnnnnnnnnnnnnnnnnnnnnnnnnnnnnnnnnnnnnnnnnnnnnnnnnnnnnnnnnnnnnnnnnnnnnnnnnnnnnnnnnnnnnnnnnnnnnnnnnnnnnnnnnnnnnnnnnnnnnnnnnnnnnnnnnnnnnnnnnnnnnnnnnnnnnnnnnnnnnnnnnnnnnnnnnnnnnnnnnnnnnnnnnnnnnnnnnnnnnnnnnnnnnnnnnnnnnnnnnnnnnnnnnnnnnnnnnnnnnnnnnnnnnnnnnnnnnnnnnnnnnnnnnnnnnnnnnnnnnnnnnnnnnnnnnnnnnnnnnnnnnnnnnnnnnnnnnnnnnnnnnnnnnnnnnnnnnnnnnnnnnnnnnnnnnnnnnnnnnnnnnnnnnnnnnnnnnnnnnnnnnnnnnnnataggtagtttgccgtgtaggggggggggggggggggggggggggtgcctgggtattaggaaattcgcctgatagagtggagtatgttccctagccaatcatacataataaacaccttatttctttcaccactttcattgaaaagataaatgaattaattggatttttattctttttgtagtcagatttctgtgacaatcaattgttttgcaaattttctcttgcccgttggttgaccttttaacttttagcagggtatcaatgattcggtcaactcctaaccgttatattttatcgtgtatcaacatgatgcccgacggttcaaggatttgctagtgctgaaagtttgctgtagtgacgttgcagacacgtaaaaggtatggcgggcaataagtcaataacgttaaaagtacggtcgtttcacgttgccgcacctatttgatgaccgcaaataacaccagtaattgttgcccttccatttatgcggggtctgccttcataagttcaacacacaaaggaccgattttcgtgtagtactttgaatatcgtggtcttttcgcgttccatgattgaagactccccttcatgtaataacatttatatttattgggcccctttccattagcggatctaagttttataagagtccctgctatctatattttctatataggcttctctactcctaaagtacctccagatatcaaggcaacgcgctcaatggccgctatcaaggctaccaggtcaaaggatgtcgtttcaaaaagaaagttgatgcggcaaaaacaatgccgtcgcaaaacaagtctgatgaaaaaggcatgcgaatatagcaggatgtgcggcgcagacgtatgcgtgggaattcgtatccgagagacgggccaggtacatattttatcagcggatacttcgggattttgggctttccttagctcgcaattagtatgtctcaaactatggctctgatgaaaaggtgactgacctatcaagaactcctactatccagcgccaatgctagtgacacaccaggatctaccgcaggttgataaagatacaccgcaacaacctatatgaagtcataagaccgaagcggaaccttcatcagaaagaacctttgtttttcccatcctcggtcagggattttatgcaaccactatcccaatagtttaatttactttactgagaatatagctgtgattggcggtccaatgatgaattctatatgaggtaattttccatgtgcagttccccatacggaagagggctctgtatggaagaaggctccgtatggaagaagactacacatggagactcactgattaccaacccaaacagggatggcaaatgcgagatatcattggctagcttgactactccttgaagcgccagactactcggtcttcctactccaaggtggagaaaggagtcctagagaacccttcttagacctccttatctccggctaacgccgaacgactttaatattattgcctccataattttcacctagattaattttagcctcatgaataattatgccagacctaatattatatctttgtaaatttaaagcactccaatatcattgccaccataattttagccttataaataattataacggggctaatattgtgtcatagtaaatttaaaactcgccaatttttaatatagctaagattaaagtaaatacatgcattcttgtaaagtaaattagaaatatgggacaaagataagaagtaattccatgaatttgtcactggctggtcttctttgcttgtattcatttgtctggaacggaacgcacctaagattccttgaaaaagcaaagggagccccaacagcagaccactagttagtagcagattcgagaaagcctcttttggcatttccaggtgacagatgcaaatggtattgctcttgtcgagcagctgcgcggacgataggatgaaatggcatgatgtgcttggtggctttgacggagacgcgccatgaaacgcgcggctctgtcgcagtatcgtcatgaaatatggcccaacgaaggcacacattggcgtaaccaccaggttcagatacctgcatttgattcagcgccccagtcacctgagaatagtctagccacagactctcggcgggacctgagataccgtgggtgacgttaaaatcctccgagaaacggatagtgccggcaaatatacccaggaagtctccctcgcagataggcacaatagaagagacgaatagagaatcgtcgtctttaggcagaagagtgatgaatgcggacttgtctgtcccaccttcgtataccgattcatcgttgtgtggtatgcctagaatatcagtcgagatagacactgagccgcattgcctgaagctttcttcttcggtgttgacggcccactcgttcgaagcattatcccaagagagctctggcactttcaaccgttctagcacctgaggattggtgaggtagctaagacgcttcgagtctcctgtcttcaatttggtaatccgcgtttccagttgttcgaaatgagggagatactcgttttcccatctcaaaactttatccacaagcggagtttccgatgttttggaataacctctgcagaaactgtcgaattctttcgtacggtagaagagaattttctcaataccagcctcacgcatgtggaatatgttcttccagaaaatgcggtattgtcgctggttttctgcacccaagctatacccggtgtcttccatgaatttctttgtggcagctttttccgccatggtgaatccatcagccgggcccttgacgggtggcagcgtggcagggtcgatcagcgccgcgcacttgagaatgattggccagaagatagtttcgttgtatcttgtctgtattgccctgccagtagttaaagcagtgtctcttcgaatagcgtgaattgcctgctcataactgtatccagagaactcttgggcgtgctcccgcatcctctcgagcttagttgttgccagggccatgcagtcgcgctgtccatattgtgcgatatcagagttgtatttgacacattgtatcaatattgttgttatgaccttcatctcgaaggctgagtttaggtgtaacggcaaagagctgtcaaggggatctggcacagattcggggtcgtcgacttcggactaaacatgacccatgtatctattagactttcttcaatctagatgaacaaaataacataccgttgtttgtacttctggcgaaattgattcctcgggtgccttatctttggctgtcccatttccatcagctactgacgaaccgggcggttgatctatcaactccgaccggtggcttctttttctcctctttttcttcttcttctccgtgctggccatatcgctataggttgtaggaccctccttccctgtccgtttcataagtcgataggacccacgagtgtcatgtggtggagtcggaggggtttctatggtcgcttccttagcctgagaaataggctcggtcgcgcccctagcaatcacgagtcgagctttgtaaactaaagcgaccgttaatgatccattctctcagacgttggcgggggctaactcaccatgatcggcagcgtgggcgataaccagattaaggtgctcctcactgtcctcaattccgcaaattgtgaatacctctcgtatcttctgggctgtcaggcccacaatgnnnnnnnnnnnnnnnnnnnnnnnnnnnnnnnnnnnnnnnnnnnnnnnnnnnnnnnnnnnnnnnnnnnnnnnnnnnnnnnnnnnnnnnnnnnnnnnnnnnnnnnnnnnnnnnnnnnnnnnnnnnnnnnnnnnnnnnnnnnnnnnnnnnnnnnnnnnnnnnnnnnnnnnnnnnnnnnnnnnnnnnnnnnnnnnnnnnnnnnnnnnnnnnnnnnnnnnnnnnnnnnnnnnnnnnnnnnnnnnnnnnnnnnnnnnnnnnnnnnnnnnnnnnnnnnnnnnnnnnnnnnnnnnnnnnnnnnnnnnnnnnnnnnnnnnnnnnnnnnnnnnnnnnnnnnnnnnnnnnnnnnnnnnnnnnnnnnnnnnnnnnnnnnnnnnnnnnnnnnnnnnnnnnnnnnnnnnnnnnnnnnnnnnnnnnnnnnnnnnnnnnnnnnnnnnnnnnnnnnnnnnnnnnnnnnnnnnnnnnnnnnnnnnnnnnnnnnnnnnnnnnnnnnnnnnnnnnnnnnnnnnnnnnnnnnnnnnnnnnnnnnnnnnnnnnnnnnnnnnnnnnnnnnnnnnnnnnnnnnnnnnnnnnnnnnnnnnnnnnnnnnnnnnnnnnnnnnnnnnnnnnnnnnnnnnnnnnnnnnnnnnnnnnnnnnnnnnnnnnnnnnnnnnnnnnnnnnnnnnnnnnnnnnnnnnnnnnnnnnnnnnnnnnnnnnnnnnnnnnnnnnnnnnnnnnnnnnnnnnnnnnnnnnnnnnnnnnnnnnnnnnnnnnnnnnnnnnnnnnnnnnnnnnnnnnnnnnnnnnnnnnnnnnnnnnnnnnnnnnnnnnnnnnnnnnnnnnnnnnnnnnnnnnnnnnnnnnnnnnnnnnnnnnnnnnnnnnnnnnnnnnnnnnnnnnnnnnnnnnnnnnnnnnnnnnnnnnnnnnnnnnnnnnnnnnnnnnnnnnnnnnnnnnnnnnnnnnnnnnnnnnnnnnnnnnnnnnnnnnnnnnnnnnnnnnnnnnnnnnnnnnnnnnnnnnnnnnnnnnnnnnnnnnnnnnnnnnnnnnnnnnnnnnnnnnnnnnnnnnnnnnnnnnnnnnnnnnnnnnnnnnnnnnnnnnnnnnnnnnnnnnnnnnnnnnnnnnnnnnnnnnnnnnnnnnnnnnnnnnnnnnnnnnnnnnnnnnnnnnnnnnnnnnnnnnnnnnnnnnnnnnnnnnnnnnnnnnnnnnnnnnnnnnnnnnnnnnnnnnnnnnnnnnnnnnnnnnnnnnnnnnnnnnnnnnnnnnnnnnnnnnnnnnnnnnnnnnnnnnnnnnnnnnnnnnnnnnnnnnnnnnnnnnnnnnnnnnnnnnnnnnnnnnnnnnnnnnnnnnnnnnnnnnnnnnnnnnnnnnnnnnnnnnnnnnnnnnnnnnnnnnnnnnnnnnnnnnnnnnnnnnnnnnnnnnnnnnnnnnnnnnnnnnnnnnnnnnnnnnnnnnnnnnnnnnnnnnnnnnnnnnnnnnnnnnnnnnnnnnnnnnnnnnnnnnnnnnnnnnnnnnnnnnnnnnnnnnnnnnnnnnnnnnnnnnnnnnnnnnnnnnnnnnnnnnnnnnnnnnnnnnnnnnnnnnnnnnnnnnnnnnnnnnnnnnnnnnnnnnnnnnnnnnnnnnnnnnnnnnnnnnnnnnnnnnnnnnnnnnnnnnnnnnnnnnnnnnnnnnnnnnnnnnnnnnnnnnnnnnnnnnnnnnnnnnnnnnnnnnnnnnnnnnnnnnnnnnnnnnnnnnnnnnnnnnnnnnnnnnnnnnnnnnnnnnnnnnnnnnnnnnnnnnnnnnnnnnnnnnnnnnnnnnnnnnnnnnnnnnnnnnnnnnnnnnnnnnnnnnnnnnnnnnnnnnnnnnnnnnnnnnnnnnnnnnnnnnnnnnnnnnnnnnnnnnnnnnnnnnnnnnnnnnnnnnnnnnnnnnnnnnnnnnnnnnnnnnnnnnnnnnnnnnnnnnnnnnnnnnnnnnnnnnnnnnnnnnnnnnnnnnnnnnnnnnnnnnnnnnnnnnnnnnnnnnnnnnnnnnnnnnnnnnnnnnnnnnnnnnnnnnnnnnnnnnnnnnnnnnnnnnnnnnnnnnnnnnnnnnnnnnnnnnnnnnnnnnnnnnnnnnnnnnnnnnnnnnnnnnnnnnnnnnnnnnnnnnnnnnnnnnnnnnnnnnnnnnnnnnnnnnnnnnnnnnnnnnnnnnnnnnnnnnnnnnnnnnnnnnnnnnnnnnnnnnnnnnnnnnnnnnnnnnnnnnnnnnnnnnnnnnnnnnnnnnnnnnnnnnnnnnnnnnnnnnnnnnnnnnnnnnnnnnnnnnnnnnnnnnnnnnnnnnnnnnnnnnnnnnnnnnnnnnnnnnnnnnnnnnnnnnnnnnnnnnnnnnnnnnnnnnnnnnnnnnnnnnnnnnnnnnnnnnnnnnnnnnnnnnnnnnnnnnnnnnnnnnnnnnnnnnnnnnnnnnnnnnnnnnnnnnnnnnnnnnnnnnnnnnnnnnnnnnnnnnnnnnnnnnnnnnnnnnnnnnnnnnnnnnnnnnnnnnnnnnnnnnnnnnnnnnnnnnnnnnnnnnnnnnnnnnnnnnnnnnnnnnnnnnnnnnnnnnnnnnnnnnnnnnnnnnnnnnnnnnnnnnnnnnnnnnnnnnnnnnnnnnnnnnnnnnnnnnnnnnnnnnnnnnnnnnnnnnnnnnnnnnnnnnnnnnnnnnnnnnnnnnnnnnnnnnnnnnnnnnnnnnnnnnnnnnnnnnnnnnnnnnnnnnnnnnnnnnnnnnnnnnnnnnnnnnnnnnnnnnnnnnnnnnnnnnnnnnnnnnnnnnnnnnnnnnnnnnnnnnnnnnnnnnnnnnnnnnnnnnnnnnnnnnnnnnnnnnnnnnnnnnnnnnnnnnnnnnnnnnnnnnnnnnnnnnnnnnnnnnnnnnnnnnnnnnnnnnnnnnnnnnnnnnnnnnnnnnnnnnnnnnnnnnnnnnnnnnnnnnnnnnnnnnnnnnnnnnnnnnnnnnnnnnnnnnnnnnnnnnnnnnnnnnnnnnnnnnnnnnnnnnnnnnnnnnnnnnnnnnnnnnnnnnnnnnnnnnnnnnnnnnnnnnnnnnnnnnnnnnnnnnnnnnnnnnnnnnnnnnnnnnnnnnnnnnnnnnnnnnnnnnnnnnnnnnnnnnnnnnnnnnnnnnnnnnnnnnnnnnnnnnnnnnnnnnnnnnnnnnnnnnnnnnnnnnnnnnnnnnnnnnnnnnnnnnnnnnnnnnnnnnnnnnnnnnnnnnnnnnnnnnnnnnnnnnnnnnnnnnnnnnnnnnnnnnnnnnnnnnnnnnnnnnnnnnnnnnnnnnnnnnnnngggtcggtcgcgcccctagcaatcacgagtcgagctttgtaaactaaagcgaccgttaatgatccattctctcagacgttggcgggggctaactcaccatgatcggcagcgtgggcgataaccagattaaggtgctcctcactgtcctcaattccacaaattgtgaatagctctcgtatcttctgggctgtcagacccaaaatggccttatccatggcgggcgatgatgatggcaaaagacaaagactgcgtcttttgtcaatgaagacagaaatccttctggaacgttcggggcaacggttgccctctggttggggggagggaagaatgagccaattaaatcaaacacaggcgaggctcacaaaaatagtatcaaccaggctaaggcaagacttgaccgggattgaccccctctttttgttgtgtttgtgtcggccatttgcatatcaaagagcaaacaaatcaaaccatactattatataaatagttctttccgtaaccttcaccatcaggataggtgtaacgcctatctggtatatgccttgcgcgcaaggacaggacagagctttagggaatattggtatctgcgcctgaattttcgaatcatatcctcaggcgtctctccgtatagtttattccaaaaatgggactgttctcgatgcgccaaaacactgaccgcaggaatgaatgtgaagccgatgcatggctgcacgatattccaggctgagcaatatcccaaatcatgtgcgatgtcggtcggatgtggtgaggagtcgatttttcgtagaaatcgaggctcgactcaagacgttgaggtgaacatttcgggtgttcaggacacgggtgagcgtccatgaatatgagtaactcagatgatttcgtgattgactccgagtcaactgttgaacagttgaaccggaaatggtaaaggttggttatgttggtcatttaaaagtggtgatgaaaagcaataaacggatggcaggtgagagacgcggcctcctggacaagagtacggtggtcaattactgccaattactgccattggccgaatacacccacgcttcctgggccccgcacactatcacgtgtatctcctaaaccttgagtcgcgctccaagttaactgcgtgaaatcgtttaggcctctgtggtcggtcgatcttatgccacgtattcaatgacagctatttagttaactaaaaaaaagatgctttccacgataactgcaccgcagaataaatgagggtagaataatagcgtgcaaggagctgtaaacgagtgttaaaggccaatcaatgctggtgaaaggataaaggtcaacgggcaagagtaggtttacagctggtgattaaccaattgaattgattgtccctcggcaatctgactacgaaatggtcgaaaagaataacaaaccgattaattcatttttttttaaaaaaaacgcagtgaaagaaatagggtgtttattgagtatgattggctacgggaaactccccactattaattatcctttggcatgcccatttttccgccatattctccaggcctcaagtaccgttcctgttctaactagttagtacctgactagttattttggggaaaataaaataaaaaaaggctcttaaggcgagaacctcaggctagctacgctatacagttgaccgaattttccaaagcagacattcattgtttacttttggccctcaaaatcagaaattccttattattaacggacctcgacgtgatacattctacatttacgttcatcacctactagagtgaccgtttcggatttttgctggtcataaactcggaaacccgcagtttctggagcgcactcctcgattgcctctagccgtggttttcaacgtaaattcggcccgctataaatctattacctgcggggggaccgtttcaggtatttgttggccatgaactctgaagaccacggtttctagatcgcaccactccttttcaacgcgaaaacccacgaatataaagaggaccgttttgtacgtgtttgtagccttaagaatccctaagagccacttcgtctatacctacgactatttaggttgccgtttccttcagtcttctctaacagtgacgcgtctctttatatagcttccgcttcttccgcctagtgcaatcgatctaaatcggtcagaaagtctaagcgccaaaaataaggccgtcgaaaatcaagccttataaaaaaggtggccgaatatagtaaggtgtgcgatgctgacgtctgtgttggcatacgccttcgggaaaccggccaagtctttctcttattagcggatgcttcgggattttaggctttctttggctcgcaattagtatatttctatatctctgatgaaaagtcgactaacctatcaagaactcctactaaccagccccaaaactagtaaccgaccaggatctaaatcttattgataaagatacgccggaataatatacataaagtcgtaacatgaaagcggtacttccaccatactaaaacctttataattaatgatttgtttgctttcatcttagtcagcgacttgaaacaaccattagtggtctttcttaatagttcaaggtagtgagcgtacatcaagaggagcagagctgatctgtggcctagcccaaacgggcctagtgaggggtacaagtatcttggcggtggggcgagagacaatttctctgtgtaacacatggaagccaatttcgaatattgctgtaaagcacgatgagctgtggttccgaagtggattgatcttccatacgcatgggttctcaatacgcccgaggatcacgggaatctaaatggcccaagttatatggtcggtttatcgcttgtgtaattcaccgccgtagcaacaagtcgatttctatatgtatgattaggcctattgatggattgatgggaagttctcatgaagattgaagttcagctcgcgccccagccccagcttgttggtctcaccgatcctgttcttgtagaagttcaagcttcgctccatgatcaccgtcaagtctccgaggatttcggaggattgccaactttacctcgtccccttcctgggtcaagcacaggtatgcggcagctctgcggttatcttattacgttgactgatatttcccagacaacccgattgacgttgatgctctcagtgacccagatatcgaaactcgcgtctatcctcatgacttgccccgcgccggcgacagtattggtttgttgaggtacttctcctgccggagacaatgaactgatcagcagctaaagaacccgatcgatcttgatgcggactctgtggcagtgagcgatacaactaaaccccttcccagcttaccagcaagcccggccccagttgaacttagaccagatggtgaggaacgacttgaacaagcctcagcggcaaatcaagcctattttatatcgacctcttatccttgcaatgatgaaaagtagtccttcacctctcttcacacactcagtctacttcgcaataagaatgaacactcttctaaggcttgcacctaccatgcgggcaggggccttgaccatcacaagtctcagccggaagcaagtcaaagattttgcacaaaattccactagaaaggcccatcccatacattcaaggctcacgactgctggccacaagtgttcggtcttgaaatcacgggcacagtcttatcatcgggaaggaggttcctttcaaccaacccagttaggtgaacttcgcttcttccagataccgttgccatcgtccaaggagaacttttaaccttccctcggggatgatgctgagcggcctggggtggtgccacccaacgctagactgctcttacgaagactgatttcagaggctgattccagactgccaaacagggggaccctcactgctctcggagaacttctttgtctagacacattccacttccgaggatagctcccataacaggcagttgaggcctacattctaagttatcatatcaatcacgaatccttcagcctccgcaatgcgtggggaacatgatagtagagtttctagagtgagaggtctaccatagatgtacgttgtaaaacagcctactagaaaactctagaaatagtacaatacaactgtcaattgaacagacttgctcctcatactgaacacagttctttcctgaccgcaacaaaccactactgcttacccacacatacatagtagccaagccacaaattcttgcagccatctcccacatagggattccacgcgaggaagtcggcctgtgagatcccgtactgcgttgcgatacttgcacatatgtctccatcctcaaccttgtgaaactgaatacagccatcgaccatcttcggcaaggtgggcgttggcgtcgcctcagaggtcggtgaagggctcagtgtggtggtagggctggggttagagcttgggctagcctccacacagacataattgtcaagccacagatttgtacaattagttcccacatctgggttccacgtcaggaaatcagctcgtgagatcccatattccctcgagatcgttgcgcagttgtcaccgtcaaccaccatatggaatttggtgcagccttttgtcatatttggctgggttggggttggagtgaccacgcctggactggtggatgtgggtggaggggtaccactagtagacgtcggtgtcgagcccacgcagacataattgtcaagccacagatttttacaatcggctcccacgtctgggttccatgtcaggaaatcagcttgtgagatcccgtattccttcgagatcgttgcgcagttgtcaccgtcaaccaccttatggaacttggtgcagtcttttgtcatgtttggctgcgtgggcgttggagtggcgatgccagaagtggtggttgttgctggagagctatctgttgtgctggcactgctcgaggtaggcgtgcagcttgtgggaatggcgctcggggatggggacggaactgggtctgtagggcccaaatcacaataactttcgtaaagcgaatagcagttatccgatagatcatcctctgggataaagccgttattctcatcttcggcggtaatccagcagtacttggttcgttcagcgagaaggcttgagagtgtggcgtttggcgtgaatgtgggaatggaaggcgtgtagtttggatcaatgataggcgaataccatgaagtggtgatattatccattgtggttaccggagttcctggtacccatgaggtaattaaagaagacggaagcccggcggatgttttatttgtgctgtcggggaggctgaactctcctcctcctgggggcctatttcaattagaatagctccatgccattgggacacgacttacgatatgcaaatacttcttcccaccatcgaatcaagattatcgcagttttggtgtattgttctgaatgcttggtgagtccgctgtcaaaaagtcaagtcgaaggtaggctaacgtacggattccatcctatcagttgcaccaatccaaatgactgggctttgataatatcattgcatgtttgattctgctgcactgtaaacacagtacaggtgtcttggatgcaaagcggcgtcccagaaatgagcattgagcatgaatagtcaagtttattcaccttgataagctgatcggtactgacagagttagctttagaaattgacttgcaagtatccccttcgatcgatatataggtgtggccagtacaagtcggtgtggcggtggtcgatgttgcgcctgttggcgtggataccatcgtggtcgccgttggcaaaggcgtgtaggtatacggatagctcgaggctggaacgctgcaagacgaaagcaatgacgagaaggcggctggcgggaacttgttacgtccgtaatcagagctcatcatgatcgagccgtacttcagggtgcaatcagaacacggggccttggttcgattatagagatcagccaaacagtacccagacctggacttggtcagtgtctattccagggcctatacggcctttccgcaggagatacacacgcgtcttggatacacatcaggctatacgcccacaccaacccatcagctaccaccgcgggcgattgcgttgtcgtgctattcttgtataactggtactccttctttccgcaggccgaaaggatgctctcctggaaggtctggagggaatcgtgacattctttcgtgcaatatgtcttggcagccaccccaaccagtgcggccccattcgcagcatcctgtgcagtaacaaggctgttcgcgcaagtcatattgtaagttagggcatttcgacaatcagaggggaccgcggtagggatgtcatctagactgtcccagacctggatcgcagcaacattttgcccaaaaaagggcaaaacgaaggcaataccgacactggtgagaagcattgcgttcaatgtcaacaagtcaaaaaattttaatggtttctaaagtcagaattcgggaaaagcctccataactgtgtctcgcgggagctcggaagttattcctcttccgaaaaaactataataaccgatggatggtcttataacactaagacagcgctagagtaaggtacttacataaattagtaggatgcacgaaatttggcccccatcaaaccctctcggataacggattggggcttggttagcttaattgcactactgcacaagtaagacatcttaggacccacttaacccacaaacggagattaaatgaagcttcttaggggcagcaggatcccaaccctcgaggttttctttcttggcagcgcactaagaggtgtgatttagcagtagttcaattcttccacggctatacggcactgaagttggggtttctcattcagttagaaacggagaattcagctaaagcagccaatctattattttagagctaagaggatgggcaagtcgttgatattccaaatttactctaggaaaaatccccctccttcgttcactccttttcttgctttcttttgtcctgtcactctctacttataaaatatttccgacagtgttgagttatccatacccgactcgcttcacccgtacatgggatcatggagagacccttccatttgctctggaagatgaactctcttacctggccattgctgtttatctgtttgatattgcttcagcttccctcggctattgcccagggacctggtgagccgggaggcacttgcacagattcaattccatgttaccaaggctgctgtagcaaagactatgcatgtggttttaccgacgctcattgcgggactggttgcaggagtaactgcaatgcgacggcagagtgcggagagttcgctgctccaggtaattctgactgtcctattaatgtctgttgcaggtaagttagcggtccgacccagggggttttcgttctaacgactaacggttggcagttcattcggatactgcggtgtcacttctgaattctgcggcaacggttgccaaaaaaactccaatggtgggggttgcggcgaaccagagtatgtctgcttcggccgctcatgtggaatataagtactaaaaccattcagtcgcccgaaatgctccgagaatactgatgccatgtcctatgatcgacgtattggatattatgagttgttcaacatccataaaggatgcaatgtgattgagccagagagtctgatcattgagccgtttactcatatcaacctggcctttgtcaactttggtgacgatttcaagttggaagacgagtacggcgacgttgtggaccgggtgtcgttcttgaagtttacccacccagggctgcgggtcaacatcgcggttggggggtggacctttagtgatgctccgacgcagcacctttggactcagagtaagtgactcaattggcaatttgaatccatgcgcacactgacgctggacgcagtgacacgctcatacgagaatcgtcagaccttcatcaactcagtggtcaaatacctgaaggattaccaccttgacggtattgacattgactgggagtatccgtccgcatcggatcggggcggagaacctcaagacgcggcgaattttgtgacccttttgggtgagctgcgggaggccttcgatcgcgagaatcctggctgggagatctcggcgacactcccaacgagctactggtacttacgcggatttgaccctgctggcatggctaaatatgtcgactacttcaatctcatgagctacgacctgcacggaatgtgggaccaagacatcacatggactggtccttacctcaaaggccatacaaacatcactgagatcgacctcggtcttgaccttctttggcgcaacggcattgacccatccaaggttgtctttggctttgcattctatggtcgctcctttaccatggcagaccccaattgctatcaacccaatggcaaatgcgaattctcggacggtggaatacctggatcatgctctgacacctcgggcatcctgacatacgccgaagtcacgtcaaggaacaactcccttgatgtccatacgttctatgatccggagacaacggtcaaatataatgtttacgaggggacccagtggatctcctatgacgatgagcaatcatttttcgacaaaaagaagttcatctccagccgatgcctgagcgggtggatgatctgggcaatcgaccaggatgatggcgattttgacgcacttgccggagttattggcgaggacctctcagtcatgcagatggagggtggtggcttatccggggatgctgccaacgtcctggccgacgcctttgccgcctatactggccaaaactgcttcgtcacaccgcgctgcactgacggctccagtggggagaagaaccccgaccaggtgtgcccatcaggatacatgtcggtcagcactgcacacaatcccctgcaggcgggcaataaggagctccgtggcgactgctctgagggatggtatcggcacatctgctgtcccgaggatgccatgcccaagaactgcgaatggaacggggcgcccgagcgaagcgagttcggctgcgacggcaaatgcgggagcaaccagttcaaactgaatcaagacaccgcgctggacgccaaaggtgaagggcaatgctttattggcgaacgctacctatgctgcgattccgcagccatgttctccgattgcaggtggaccaattgccaagggccgctgatgccttccaccccaggcgaatgcccggcagacaatgatgccctgacattccgctgggataagccggatggcaagccgtggtgctccgatacttacgtatcgtctgtcgacggctctgttggtagcccgctgcacgaccgcttcaaaagcgagctctgctgtccatcagatcacagttttagcgtcagtggttgcgcatggaccaacaccctttcccaggctgacatgacagacgacgactgggcggaacatctcacggatctcgtctgtaaaccgcgtccctgctcacctggaaaggtaaaggtagctggtgcgctcgatccgccaccggcgacgggcgcaggatccaagtcggagattaactgcgctggagtcactatcccgcctggcagtaatcctgaatggtcgttctgttgtgatccaccgagtcgatacgacaagaactggcccgttgatcccaagtacctatgggaaaaatactataacgaccctaagaagtcggatgtcgtttgggaatacagcgatgagtaccagaacaacaacatggatagcgagccctctacggaggaggatggcagcgacgcctatggatttgtgatgctcgacggacccgatggatccatcgacaacgacttcgcgacgtcgcataccgttgtacgtcgttcccgggaaatcccccgagtcaaacgttccgttttaacaacgaaccaaactctcatggataccgtcttcgaccacgcggaggagacattccatttttactgcgactatcccgcaggatcccacgaatgcgagcgtgtcttcatcgatggcgccgaggacacaatcatccggcttccagaccatgtcggcgacggcccgtttgcccgaattgtctccatgaaaacagcccacgacgagtatcaacttccggatcatcatttggaacatcggtcgctcgagcgcaacacgaaccccgtctatgaggtgaagatagactataatttccatctgattaagctcaagcgagatgatgagcccgtgaacattcgcgtggactatacgaatctgatgggatactgggatgaaatgaccaactcgccagctagccgcgcgaaacgtggccttggagaagagggcctcaccaaggatgagtggcgctcccgagttcaacgggccgttgtacgccacggtaatatcgagaagcgtagtgaggctattcatgtgaaaacaccaatggagttctccggctcccacctcgacaagcggtggtggggtgcgttcaaagcctggctacagaaactggcatgtattcccctggtgactgcgtactctttgctccaaatacatactaacgtccatgccagactaaggtaaccaaatccagtttgggcgtgatcgaactgggattctccaagaccatcaacttgttccgggcgcaatggggatgtcccggccagacattctcagctaacctccggatggatttggaagctgacctcgtgatggatgccacttatgcctactatttatccgccaccttcatcccccccggcaagcccgaaacgtttgcttacttcggaatgaatccaactgcttatctcggactccacatcgagggaaatgcgcagatgcagacaacaaccgaccgcaagaagatcattgacaccctttcctatcctggactggccgtgaagggaattgcggcagtcggaccaacactagacatttatggcgaagtaagactttaaaacctcccagtagatatgcatataaactgacatcgatccagatccgaggcaaggtaactttgcatggcgaggcgactgccggagcacaactgtccttcgggaaggcggaggtttactggccgcagaatgatgatgcaaaggataagtatgagacactgctagggctccaaagtgacgtacaggcgcccgctcctggttctgttgagccagtctttgaagcaggtgtggctctggacgcgcaactcgacattatcgtaacaccggaggcacatgttggtatcaaaatcggcggcgggaaactcgtcggcggtgctaccctaatggacgcgcagttaaccggctacgtaatgggcgacttatccttccaggctcacggtgattatgacacgactggtaacgagttcaactacagcttcggagcgtacctcttctacaatctcgggtacaaggccacggcccaaattctcaacttcatcgattgggcactagcgcctcgactggcatacgacccgcgtaagacgttcaagctgtacgagaagaagggttcaatcccaatgtcgtcatcagctaaatcaaagcgcgaggccgccatcgatggccctttgcaccggaatcttgtcgaggtcggctcgttgaccaacggctctatctctacataccttgattccgcctcgggtttgtccaaacgtggtgatgaaatggatatcggtacgtgaaaagtcgccctcttaagtggcttccaaaagtgtcccagcgctttgagttactgatgattccagatggccccaatgctccagagtttacgcagaacctcaagtgccccccgggcaccagtggagacgttcggctgcccgaaattcgatgtaagccaacccagcctcaaccaaccctccctaaacaaaaagtccatcattctttccgattatcgttgctgactgaggacagttaactgtgacttcctcaacgactttattgaagaaggcaaaaatggcaaaatggatgctattaccggtctctgtacgcccgtgctgaacatccctgacaataaacgccagaagctattcaccttctcgaatgacaaattaaggaaggaggcacgatataacgcacaatgtaaatcagggacctgcacgcaggcaactactgacttgcgagaccaccaggggaataagaagctggagctgcagtgcgacgagttcccctggaaatcttccgagcaaggcggcgactatctcgctagtgacgctcgcacaggtacctgcgtggcatcttaccagaataactggcatgggcaatgtcttcgtaagtcacgtcatggtctgttggtcacctttgtaggactttgctgattggttcctatagggatgataggatacatgcaatcaaactgggccaagcttgagcctgagagggaagacggagacaaccgcggcgacttctggcaggattggagagaggattgtatgacactatctttcactcagtcttcttttaaaaagatactaatgccaacccgcagcatggacaaaacctgggcagcacggatctaaaggttcgcaatacgagcagagactgaaggaataccccgaaaagcagcccctgcctgacggagtcaccacgcgagtaagtgtcaccaactcatatccagagaggtaaacaacatttctgactttaattagaacaacgataaaatatcctgggtgtttaaacgggactacgaagtatccttcatccgtcaagacccaagcactatcgatggtagtacgtggtggggagcgacgagtcacaagttccaaaagacgacccacagtggcccatcagggatggatgccatcttttgcgcgattaaccattttggccaggataacgtatataagttgccaaacggctataatggcctttgccgaaggaacaacggtagccccctcacaggttggaatgtcggcttcaacatggctaggtgcgaggtgaagtttgcgaaccccagtagtagtaacaagcgaagtatcggcacctttgctgggtgggaagtggaaagtgtgcgaatgctggatgaggacgaccatgaataggaggacaaaatagtgctagtagtatagaaatgtattctgatcctttgttttgattgccgctatgaaccgcgagactaaacgtaagattcaaagtgttgtatagtctatggtattaagcaggggaatctctgaatcgtataggatattgtaccgtcaacaattgtaggaattaacaaggtggtggtttttatttatatgtgcttcacgggcggactttgatgactaatcagttctgatatcactacatgcaaacagtgcaaaatagtgtttaacgtgtcattttccccgtgctggacaggcagggcctttccatctaccgtccagagctctgttttgttgcccatgacagtaatggacaaggcataccttccgcaatggggccagttacccgtcgagcattacttgatcgtgagtgtcttgcgccaatgttgttgtttcccctgcgtggctaatatctataaagaaacaatgggatcactcctcatctgagcctactggagaccagcgcctccgactgatccatcagttcttagatctagatgagattccgcaggaactggaccctactggtcatacctcggacacttacgaaacactgtcacctacggcctatgagattgacactatccttcgcccctggcgctctgatgacctacggaagatagcgtggaggatttgggggtgtcataatgatcagttgattttgttacgcacccactacaatgccgatgacaaccacaagatcacggaattagtagggtccgatgagctccacgaggagaggacagcctggtgggcacttcttgataatcccgaactcttcaattttggtgaccagtggtggcgagtcttcgatatcttgccagagttagccggccctttgaatggttatagccgcctgccagacccagaaagtatctcacgggagagacaggattttaaggagagactaccgaccctcaaacaaagcgacgaatggacggcgaatcgtgataattatattgaaagagagtttgcataccttcggcgaatagcttcagagggctatcttgctattgcagatcaggaagcttttgaaacagatatgctacggttaatctattatgatgggaagaggaatattgtccaagagacccggacagaattcgatgagcagacatttgctgatgttgccgttgaatgggaccagttgtcgcttcctatgcaattatgggaggacggaaagactggtgagaagtatcgagtgaatggggagctgggaagggagttatatcagctagatgaggctgatctggaataagcatggccatgtcgaatctggtggaatcgtggcacatgatatcgttcgtttgctcgttggcgtcatgtatttaggcgccgcctcttcaacagagggactcttcatcatctttatcgtcaattcaatcgtttatcgtcgttccaactgcttaaacatgtgagcgttactagcgccaatatgatagcaggttggaatcaacgtacagattctcccggaccccggctaggatgcgtattgacgggtcataatacatctggtaaatgcgtgcataagaaccaaccgggtacaccacaacacttttgacagccctcatgatgcagcttcctgtatgcccgaggtgattcttgggtagtgagctctcattggcttgcctgtgccccgatcttaccctctcggtttgaccaatgtcaaattgtaggctaagaatgagaagactttccgtctccttccccttgcaggtggacttgtgctaacagcctgattgtctgcagaggtacgctcatctgccaggaagcaagacaaaacatcagcattcctgcgcctttttccacttctggaaagacatcaaatgtcatccgcagacaacgaggatcacgcattcgataccagcagcctacgccacttgaaggtatttgaaaggttgcatgcttagccacaggtatgattcgggtagtggtataggctggtcggagttcaggagttgtatcatgtagacaaatcgaacaatgacctgatacacagaatctagggagaaagaggccgaggtacgcgatacgaatattctggtgactcatcgtcgatagtagtcatgcggaagggacagagagcatgcgacagtatttgtataggggagctcgagcagacaagacatttgttcgcgtggcattcgactcgagtgatagaaatgagggtgtcctgttatacgatccgagtcagcaaggattgatctagttggacgagttgtcgtagcgtacctgttcatggaaatccccaagtacgctcgagacgggacaatcagtttgcgcaatgattatatcggcttcacaactagatcacttacaactttctgcaatgcagttaccagccatgccacgtcgtattcaagctcatcgtaatctgcactcgcttcaaaaaagccgcgttggggtgcacaagacaatttgttgagacagtaaacgcgcgttacgaacccacttgcgataaacattgcacttccatggtggatgaatgtgtcgcgatgccagaggtccagggactccatagctgtatgaaggtggtgggacgagggcggaagacgcgatgaagcacgctcgtcggccgctaccttggtcttatcttcgatctggcggaataggccactcgcacagtatattttaccgtcgatgatggggtggccctataatagcgtgaagatgtcagcggtgttcgtggttagaggaataatgcttggcgcggatggtcagacacagcgcagctgtaggcgttagatctcacttaccttagcatggaaatgggagtctcaaggttctatgcaacgaagttcgcacatggatggccgcaccctgttgttgactcgctaccttggtttgcgatcttctacctaggacatgctgcattgttcgaagcgacggggctaggaatagtgtgtaagccatggctttgcgtggagcactgacggtagtgcaaggttatcagggccactctggtgagctcccaaaggttcactgtcaattatcagccagtagatcagcgtgggatcccataactcacatgttctgatagtcaacaccaggatgaagagaccacaagaagctgtggcccttgcactggcgtatggtcgaatgtccatggatctggttgtcccgcgtctttcaagtcagtacagtttcaaacaggatttccagacctctacatatctacagcataaaccctaagccgaaaacttgggttttcacatacctaaagtatgagcagttgtgcttcaaatttgaagtccatccagaggcgtgacagtagatcaactcagtcggctgctatagcagagacgacttcgcatagacactttgaccagctaacccaaatctaatatatttgattgactggcgtgaatgggacagtgaagctgcttggaatcacatctcttacaggcactgtctgatttgctggtccacaatgtatactataaatgtcagtacggtataaattccagtattccatcaaaagggagaacttatcgagcgcgtcagacacaagcctctcgacgttgcaaaaccaggtgaataatcgtagagtaaattgccggggatagaggacgtatttgtaggcttctcggtttctgtcaaccaccaacttgataggaggcgttgaaggacacatttcttgattgaggcctgttgagacccacgtgttgaatttgcagcaactatttgcagcgacatatttgatggttttacgtgcatatctttggttttcgtgttctacgtttttcttcattattatttttcctctttttctattgtccgcactatgttgccttctgcagaaagcgaccatgaatttgctagagctcaactgtctgtcgtattggatctctgccttcctagagtcaccacatcaagctatactagtttgataacagctttagttggcaggacgcatgaaaggaaaaaggaaatgcttaccaagaccatgccgaaataggaaccttctcacttaaggccaaataccagtcatcttcacgtacttagacactagtttttcaccttagggtcaacacgcggttacgtttcactgcctattgacatctctaccgcgatgtgtcttcctcaattgtggaaattggtacagacgtcggtggaagctacagtatgttccgaaactccaatggctatacagtgcgccccgaaactgatgcaaccacctaccctcttcgattgattctcgaggctccaacgccaaaacgcgctctatattgggggttcttccggagtacccctgtcagtaggatgtgtaagttattannnnnnnnnnnnnnnnnnnnnnnnnnnnnnnnnnnnnnnnnnnnnnnnnnnnnnnnnnnnnnnnnnnnnnnnnnnnnnnnnnnnnnnnnnnnnnnnnnnnnnnnnnnnnnnnnnnnnnnnnnnnnnnnnnnnnnnnnnnnnnnnnnnnnnnnnnnnnnnnnnnnnnnnnnnnnnnnnnnnnnnnnnnnnnnnnnnnnnnnnnnnnnnnnnnnnnnnnnnnnnnnnnnnnnnnnnnnnnnnnnnnnnnnnnnnnnnnnnnnnnnnnnnnnnnnnnnnnnnnnnnnnnnnnnnnnnnnnnnnnnnnnnnnnnnnnnnnnnnnnnnnnnnnnnnnnnnnnnnnnnnnnnnnnnnnnnnnnnnnnnnnnnnnnnnnnnnnnnnnnnnnnnnnnnnnnnnnnnnnnnnnnnnnnnnnnnnnnnnnnnnnnnnnnnnnnnnnnnnnnnnnnnnnnnnnnnnnnnnnnnnnnnnnnnnnnnnnnnnnnnnnnnnnnnnnnnnnnnnnnnnnnnnnnnnnnnnnnnnnnnnnnnnnnnnnnnnnnnnnnnnnnnnnnnnnnnnnnnnnnnnnnnnnnnnnnnnnnnnnnnnnnnnnnnnnnnnnnnnnnnnnnnnnnnnnnnnnnnnnnnnnnnnnnnnnnnnnnnnnnnnnnnnnnnnnnnnnnnnnnnnnnnnnnnnnnnnnnnnnnnnnnnnnnnnnnnnnnnnnnnnnnnnnnnnnnnnnnnnnnnnnnnnnnnnnnnnnnnnnnnnnnnnnnnnnnnnnnnnnnnnnnnnnnnnnnnnnnnnnnnnnnnnnnnnnnnnnnnnnnnnnnnnnnnnnnnnnnnnnnnnnnnnnnnnnnnnnnnnnnnnnnnnnnnnnnnnnnnnnnnnnnnnnnnnnnnnnnnnnnnnnnnnnnnnnnnnnnnnnnnnnnnnnnnnnnnnnnnnnnnnnnnnnnnnnnnnnnnnnnnnnnnnnnnnnnnnnnnnnnnnnnnnnnnnnnnnnnnnnnnnnnnnnnnnnnnnnnnnnnnnnnnnnnnnnnnnnnnnnnnnnnnnnnnnnnnnnnnnnnnnnnnnnnnnnnnnnnnnnnnnnnnnnnnnnnnnnnnnnnnnnnnnnnnnnnnnnnnnnnnnnnnnnnnnnnnnnnnnnnnnnnnnnnnnnnnnnnnnnnnnnnnnnnnnnnnnnnnnnnnnnnnnnnnnnnnnnnnnnnnnnnnnnnnnnnnnnnnnnnnnnnnnnnnnnnnnnnnnnnnnnnnnnnnnnnnnnnnnnnnnnnnnnnnnnnnnnnnnnnnnnnnnnnnnnnnnnnnnnnnnnnnnnnnnnnnnnnnnnnnnnnnnnnnnnnnnnnnnnnnnnnnnnnnnnnnnnnnnnnnnnnnnnnnnnnnnnnnnnnnnnnnnnnnnnnnnnnnnnnnnnnnnnnnnnnnnnnnnnnnnnnnnnnnnnnnnnnnnnnnnnnnnnnnnnnnnnnnnnnnnnnnnnnnnnnnnnnnnnnnnnnnnnnnnnnnnnnnnnnnnnnnnnnnnnnnnnnnnnnnnnnnnnnnnnnnnnnnnnnnnnnnnnnnnnnnnnnnnnnnnnnnnnnnnnnnnnnnnnnnnnnnnnnnnnnnnnnnnnnnnnnnnnnnnnnnnnnnnnnnnnnnnnnnnnnnnnnnnnnnnnnnnnnnnnnnnnnnnnnnnnnnnnnnnnnnnnnnnnnnnnnnnnnnnnnnnnnnnnnnnnnnnnnnnnnnnnnnnnnnnnnnnnnnnnnnnnnnnnnnnnnnnnnnnnnnnnnnnnnnnnnnnnnnnnnnnnnnnnnnnnnnnnnnnnnnnnnnnnnnnnnnnnnnnnnnnnnnnnnnnnnnnnnnnnnnnnnnnnnnnnnnnnnnnnnnnnnnnnnnnnnnnnnnnnnnnnnnnnnnnnnnnnnnnnnnnnnnnnnnnnnnnnnnnnnnnnnnnnnnnnnnnnnnnnnnnnnnnnnnnnnnnnnnnnnnnnnnnnnnnnnnnnnnnnnnnnnnnnnnnnnnnnnnnnnnnnnnnnnnnnnnnnnnnnnnnnnnnnnnnnnnnnnnnnnnnnnnnnnnnnnnnnnnnnnnnnnnnnnnnnnnnnnnnnnnnnnnnnnnnnnnnnnnnnnnnnnnnnnnnnnnnnnnnnnnnnnnnnnnnnnnnnnnnnnnnnnnnnnnnnnnnnnnnnnnnnnnnnnnnnnnnnnnnnnnnnnnnnnnnnnnnnnnnnnnnnnnnnnnnnnnnnnnnnataacgaacaaatcacggaattagtagggtctgatgagctccacgaggagaatgtagcctggtgggcacttcttgataatcccgaactcttcaattttggtgaccagtggtggcgagtcttcgatatcttgccagagttagccggccctttgaatggttatagccgcctgccagacccagaaagtatctcacgggaaagacaggattttaaggagagactaccgaccctcaaacaaagcgacgaatggacggcgaatcgtgataattatattgaaagagagtttgcataccttcgccgaatagcttcagagggctatcttgctattgcagatcaggaagcttttaaaacggatatgctacggttaatctattatgatgggaagaggaatattgtccaagagacccggacagaattcgatgagcagacatttgctgatgttgccgttgaatgggatcagttgtcgcttcctatgcaattatgggaggacggaaagactggtgagaagtatcgagtgaatggggagctgggaagggagttatatcagctagatgaggctgatctggaataagcatggccatgtcgaatctggtggactcgtggcacatgatctcgttcgtttgctcgttgggcttcatgtatttaggcgctgcctcttcaacagagggactcttatcttcaagcatcttcatcgtctttatcgtcaattcaatcgtttatcgtcgctccaattgcttgaacatatgagcgttactagcgccaatatgatagcaggttggaatcaacggacaaattctcccggaccccggctaggatgcgtattgaccggtcataaaacatctggtaaagtcgctccctccagaacagtttacggtgacctccttcgtttacgtcctcgtctcctctattcatctcggaagcgcctcagagggtaaattggtcctgcgacgggtacgtcgcaatgacagtctaggatctcttcaaatctctaatcctaccacagagtcaatcactcaagaccaactcctcgcaaaaagatgcacctgaggccagatcccagcaattcccgcagctccacgcacattgagagagtcagacattcctaatggcataggaatgaaacccgattgatgagggaaccatgtacaggtctcaactatacgtatcactctgttcagcgcccctggccagcagcagccgcattatggcctcatgtccgttggatgatgcctcttcaaacgcactgccgcggtctccaccccgtacgttgatatcggcacctcgagctagtaggatctgcacaaccttttcatgcccctcggctgatgcagcttgaagtgcactgtggagcccttcactgtgagaattgatgtccgcgcctcggtctagcagaagatgcacaatcttctcatgtccttcagatgctgcgacatgtagtgcagtgccacactcctcatcattgagattgacatcggcgccccaatctagtagaatctgcataatcttctcatgcccttgaaatactgcagcttgaagtgcaagtgacataattctcactgagattgacatcggcgccacgatttagcaaaacctgcacgatattctcatgacctccaaacgccgcgagttggagtgcactactcgactcccaattggcattgatatctgccccccaatctagcagcatctttaacgtgtcttcaaaccctttagacgatgcacacatcagtgcggtaaggccgctttttcccggggcattgacatcggcgtcacggtccaacagcatccggacgattgcattttgtcttttgttcaccgcgtgagtaagtgtcggatagacgggatcgcctttgatactccgatctgcggcttgcatactgagatccgcaccgtggtcaagtagcatctgcacaatggtttcatggccattggatgatgcaaaatgaagcgcagtactgtcatactcccctttccgagcattacactggcgcctcgatctagcagtacctgcacaaccttctcatgccctctttgtgcagcggtgtgcagtggattccagagttccccttcctgggcatcaatatcagcaccgtggtcgagcagtgaccgtacaatattggcattcccgctgaacgacgcggattggagtgcactgcctttatccaagtccgaggcgttggcgtctgcgcctcgatctaggagcatttgtacgatctcttcgtagcctcgatacgacgcagcttgaatgggaggactgtcataatattgcaactcttggtatttctcattttaatgatactaggaggaggtgattgctctagcgatcctcgcctcgaggacttcgcccaagtaatgtcagctaccttgctctcctttttgcttattctcaaagtgaggcgatatctggcattctcatcgcacttgcgtgcacatactatatccatgtatgcaatatcctaccccacaccgagttgggcggataggttcgtgccggcgtgctggcgggctgtcatatgtatgagatgcatactcgtctggcaccacgacaaaagatagagacgccaggcggcacgttctgattggggttttaaaggaatgtaagctacgttgtgccaataggatccgttgtctgcccctagtgcgggctgctgcatccgcgactcgaaaatcatagaacgaggctcgcaggaagaacagggccacgttgcaaacctcatgcaaggcctgtgaggtgttaagtctgactggagtcccaggaaatcgttgacctcggtaccaaagaatatcccaggcgaagatgactcgggttgcagcttgggacgctctcgaccttcaaattcaacgacgggaaggggcgtgtgccgtccaaaatctatttctcgtcgaaacgagcggatggcaaaatggagaagcagtaggcaacgttgtcgggtcaagtagctcggcccctttcgagataattgtccagatggctgtgtcatgatatcttttgaggatttcctggcctgcaaggaaagcattctcttttttcagcagggagactgctcgcgcatagtcaagcttagagatatagtctatccattctcgaactgaatgtgcttgacggtgtctcatctcaggagggccggatactcatcatgaccacgaaccataggcttttctcctaacttcctccctccctcgctcgatggcgatatactttgcttcattacgctacttgggtgaattttctggccactttctggttcgagcccaatactcgacaggcaaaacctgttgattggtctcgctgaagactgtagtggcaaaatcatgccagaggttgcaggtgctttcactctgtcaacgtgtaatgttcaacattggacccagcgttactgtacgtgatcggcgccctcaattaattgagcgcgttgaaatctgtcctcccggccgtccgccaacgacctcaacaagcggaagcccttaactgctggagacatacatcttaccaggcatgttcagtccttacgcaggataccgaatgctcctatgatgagacattacgttcctgggaacgaggtgtctgttcctacgaaagggttgacatttcacaggaatagcgtacccatacttgtgagtttatccactttcaggagtcttacagctgttctgtggagttgcctcgcaccgagtccgtgctcttgatagtctgcattgtggcttatgtggtggcttcggtgtatctttaccaacgagctccagaccctggtggttactagttttggggctgtacaatacgacaagttctcattgtgaggtgaaagcttattgtggaggagagccagtcggccactaataacttctgggagctgtaggtcctctgagaattctccatacgtgtccatgacagttgtactataggctgcgtcgatcgaagatattgcaagcgtcttggttggcgagtgtgggttttcgtaagtgtgttttgcacggtcatgttttgctactccaaggtggagaaaggagtgagagaggaccaatcacacgttatatttccccccgacacgcccattggatacatggttgtgaagcgccttgttttagacgacatgatttatggcttgctggactctctagtcttgtgcggaattttgcagatgttgattgccaggactgaggacactcccgcactatcactccaaatataccgtgtgattggttcaccgctactcatttctccaccttggagtaactaaattatttgttccaagaggtaagtcatatatctgtaagagtggtatcatatgacgtatagcctctcctaaggcttgtgctctccggtgatgtctcatataaacgtattactctcaagaggatcctcacaaaagggtttccctctgaaaacagggcccttaatacgttcttttcaagctatcgtgattccagcaacgcatgattgtactctcgtgatagcctgcttatagtgaaacacacaaaatcctctgtacgttatacatgcagaaccaacagatgcctctcggatggtaaaatgtcctgagacgtttctctagtaagtacactcatgtttgtacaaccaaagctcccagggtacgacctctcggtccggagctatacagttcactcccgggagctgtaggtcctctgggaactaagatttttactcctgggagcaatcataagcgttgtcaaggatatacatgaagcatacggaatggatggagatatgatctgcgcgggacccacttagtgtatatgggttcccctgaacgcgagaaagctacctttcttttgcttcctcgcgctacgtcttgtatctagagtcaaccatagttgttcttaatatcgattgttcatcttgaaacactatccacctctatgtatacgtgagaccctcacaagcatgcctaggaaccatgccataggtcctggggtcgaatatgatcccaggaacgtgagtgtcgcactcgcgagataaaatgtggaatctggaatgggtaatcaatattagaaatacaaattgaaatgcgggcaataagtgcgggcaacagaaagaagtgattaactgggccaaaaaaaggtgaaaagacactgttcgaagagagaaatgatgttgatgaacgataaaatgcaacagttgtttgggagttgactcaacgacgctttcctcgacacatatcagtagaataaacgaaacgtcatcgactagtggatgatagacaaacatgagggtcaacgggcaagcaaacttgtagccggtgattaaaccaatgaattggttgtctcagaatccgagtacaacatggtcgaaaataataaataaacgaattcattcattcgttttcttgttagaacaagtgaaagaagtaggggtgtttattgaatatcattggctagacaacagtctctactctaaatcacgcgcatttcctaatacctaggtaccccctaagtctactgtaagaatttatttcaccctgctcaccctaagtttgatgtcttcctagataggcctgtggtatgtccacttttctgccatatttcctatgtctccggcctaagcgctcttgttgtacctgttggctaataacagttctctataataattaaaggaagccatgtactgaagctcagcgtggaaaattcttcaatctttatgagaacttcctatcaatctatcaataggcctaattatatatatagaaatcgacttgttgctacgacggtgaattatataagcgataaaccgaccatataacttgggccatttagattcccgtgatcctcgggcgtattgagaacccatgcgtatggaagatcaatccacttcggaaccacagctcatcgtgctttacagcaatattcgaaattggcttccatgtgttacacagagaaattgtctctcgccccaccgccaagatacttgtacccctcactaggcccgtttgggctaggccacagatcagctctgctcctcttgatgaagggtcctcatttctcgttcgtccaaataatgactggaatgactgggtgttgtgttttgactctggagtctataagacttggggattgaaacttaggcgccctggtaggggtcaacatttgagtaataaaattcttcagcggtaggatcccgaaagcgattgaagatagggccaagtcagccgcatgttctcttagatcgaccaaaaccctgcccagtgcctccatcacgcgtcgttgattgccacccacagtccctattttgtgaatacagtacttccaaaagggggaacgcatctcagcttgctaaaaccaaatcatggaccgccgatcattaccgaacgagcttatcgaagcgattctcaggcaagtagacatgcaaaccgtcctcctcgcccaacgagtctgccgacaatgggccctatgcatccgagcatcttctccaatgcaacaaattctattcttccaaccagcaccagccaacaggccacgccaacaaaaccccctgctagcatccaaatttccatactggtttcccgccgatgacactaagtcatgtgccatcgcctttggcgccggcgacatgcaggatttcctagagagcagcgacatatatcggcggccggaggcgagctggcgccgaatgcttgtccagcaaccacctatcatggcgctgggatgggtggagcgtagcgtgtcgccatccaacgtgatagacctgcatcgctgggaaattccactgcaagcacttggtgggttacaaatgaacatactgtacgatctggtcgtgaatacttcggaggttgcgccggaatacttctatttcagagtcttatggtcgcaaagtaagactttaagcagtagctttgctagccttcgctcagatccatgtccgtctttcaattcggacaggatcgatgggccactcaggcatgcaatgcagggtgcggatgtggttcttgatatgtggtatacaagtcaaatgaaaaatcatctctggaagggatggtcgaaagatacgtggacatgggagcttgtgcgggggctgaagcttgctatggatgactttgatattgatctggtgcgctgcatgagagagccgaaggaagtcaagagctggactttggcggaagagttgagtgactacgctagagaagtaggacccgtcgaccatgctatgcctttgcctgatgaggatgacccggacctgtaatgttaaggatttggaagtatctgaaactcatgatattatttgatgttatggttctatggtcgtagcctcgtcatcgctatgcacagtagacaaccccgagtctgccttgaatcgctatctcttcgacggaccgagcttgtactcatggagtatcgaactcaggccactggtaatcgtcataaatttgcgagacgggtcgtgcaccttttgtctttcgagacgaacggcgaatggaatggtcgtagtgtatgggcgatagaagtgctcgaacagaccgcatctgactccgtaagccgcatcggtttgagggcaggaggatgtggtatatacaatgattcaacgatctcagcgtatctgctttctgatgagcagagctgatctgtgacctagccgaaatgggcctagtgagattcactatcgtcttggcggtggggcttgagatagtttctctgtgtgaaatgtggaagccaattttaaatattgccgtatgcttactaccttgaactattaagaaagaccactaatggttgttttaagtcgctgactaagatgaaagcaaataaattattaattgtaaaggttctagtatggtggaagtaccgcttttatgttacgactttatatatgttgttccggcgtatctttattaataagatttagatcctagtcggttactagttttggggctggatagtaggagttcttaataggttaatcgactttttatcagagatatagttggaaatatactaattgcgagctaaggaaagcctaaaatcccgaagtatccgctgataagagaaagacttagccggtttcccgaaggcgtatactaatatagacgttagtattgtatatcttactatattcggccgccttttttataaggcttgattttcgacggccttatttttggtgcttagactttctaaccgatttagatcgattgcactaggcggaagaagcggaagctatataaagagacgcgtcactattagagaagactgaaggaagcagtaacctaaatagttgtaggtatagacgaagtggctcttagggattcttaaggctataaatatatacaaaacggtcctctttatattcgtgggttttcgcgttaaaaaggagtggtacgatccagaaactgtggtctttagagtttatagctaacaaatacctaaaacggtccccctgtaggtgatagattcatagcgggccgaatttgcgttgaaaactacggctagaggcaatcgaggagtgtgctccagaaactacgggttttcgagtttataactagtaaaaatccgaaacggtcactctagtaggtgatgaacgtaaatatagaatgcatcacgtcgaggtctgttaataataaggaatttctaattttgagggctaaaagtaaacaatgaatgtctgctttagaaaattcggttaactatatagcgtagctagcctaaggttctcgccttaagagcctttttttattttattttccctaaaataactagtcaggtactaactagaataggaatggtacttaaggcctggagaatatggcagaaaaatgggtatgccaaaaggacatctttcttggtgggtagggtgaaataaattctttgtagaagactgggggctggggggggggggaagggtttgcctgggtaataggaaatgcgcgttattgggagtggagactgttgtctggccaataatattcaataaacaccctacttctttcactgtgtttaacaagaaaagaatgaatccgtttattgattcttttcgaccatagaccaccatataattactggctgcaaatttcttgcccgttgagctttaagtttccactactacggtcttatatagtactactgtgtttctgttctctttacagtattgctgatattgtggaaagtatcgttgatgtgtatggtctctggcccgaaattagttcagcctggtacctctgctccattccgagccctcggaccaaactgggccactggaaaacagattatggtctctagagagacgacactaataggatctccgaggccttaaagcctagactattacaaaataggaatctcccgtcaatgcgtatattagcgcagatcattgtgtggagactaggttatggcactctaaagtggagctgggagtaaaatgggccaattaagcctagtgcttgctattcccagatgtggccgcaggtcctctgaggacgactgaagggtctctgaggtcggtatcctcttcgtgatgattctaaataattctaatgaagaaacttcagctagtttcgcggtctaattcatgagacctatgtctcctttctctgagtatgcgcttgaggtttaaggagcaacaaagctcccagggccggcttcttggagctaacggggcagtctctagggtcgacttcctttaaggatgaggatgaattaagaaatatcagaggtagtttcatacacaggccctatcgactttaggaacgtataggctagctctgggagtttcgctgctcctggaacctcaagcccttaaaactttctggtcctggtatgggcaaatttactcctaggagggtttgaaagctcctaggatcgcgggttagctcttaggggtgtaaagtctgtctctgggaatatgagccgcccctcctggaaactacattgatcctggaactctaggttaagttcctagaagccgctattggcaatcccaggattgacgaagatgcctgggatcagaattctttcaagtatggatgaagaaactttagcgtagtttcgtgtatggatccactcctttcttttacagcctcatagagtgcgggaacgtattggctagtcccgggaaccccactaccactggaaccttaagccgtccgtagaggttaataggggtctccgggtgactgaagtgcctctgggatcgcttagagtgtccctggtattgatgttagggatatacggagtatgtgagcttatatagcattagctctatcagccctaagaacgtgtaaattggccctaggagctttgtgctcctggcagatatatgtcctcccgggatcgagtggaatgtctctgggattggtatctacgagggtttctagtaaatatccgcgggttcatatgtctccttttcttgcagtcctatgagccctattttgatataagtaactgtcacgaggtatagatagctaggatatgctgtctattcggagcaatctaacttaagcttcgtacgttggggactgagctatagtaatgacgtcactcgaccttattggtggtgataagtggggctcggtgtagattcataactcctaagtcaaaatggactatatacccttaagaatgcaagggcttaatattgaataacgcgactgtacggtctaccatgtcggctagtcctataaggactgctctggtggagagtatatcaccgctaacgcagacccactcgaatacttctaattcggaacacgaccgttcggtgaagctgagcgttgaagtcggcatatctaaagacgaggcatataatccgttgtagctaggatacctgcctgggcttgaagcacaatatagttaatgcaccatggaaattttaaagcatatgataagctaattagctcaattttttttttgaggttgatagatggtgggaaagatgaggagatgggctgatctactagataagacgtatattcgttcagaatattatgtatacgtgctgatattctctcaatttctaaaataagtgcggtgtagaaggtgggtaaggataaggtattcgattacatttagctcttgtcccgcttgacatggaataaaggatctttttcgcgggaatcggcaatgaagaatgagggtatgaatattgaaatatgaggtatctaatgcgggggatataacccctcgagtatctatacaatttttaagtgatggtaatgaagctctttttttgataagtggtttatctctggcatttttgatatatttctgccggctgcttgattctactgagtatttggatggagggctaaagtacgtatatgtcggtgtgggccgtattgtaaaatgtagggtctaattaatggtgttcaactctctgtattgctgtatcgactttcctaacaatttatatgggccgtcaattactaatctaaaattacaaaatgtataggatcaatggatcctccggtatgccggtatgccaatgtatctattccgatagtatatttatgcctgaggcaccagttgactctgagtttagaggtgagtaagctggatccctctatgacagtcctttccccttgccgaacagtgggctgcctactctgttaacttcattcgattatctgttgaatacttcttttaacaatggaccgaggaaacaatcgctgaattacgatgtcagcttgaaaaataataaaggctccgagaagcagcagagcgcagctagagggagagagtacggcgactctaaccctaaagaagggacttgttgccctaagggaaagagtctgtacggttggtgatagttgcaatatgtcatgcctatcgagccaaaaagaaataggttaccacatccattgtatagatttcctatcgctcgctatgttcgtgccttcgcttgtgagattataagaatctataactatgttgcttagcctcctgctaacgacgatatgcttgcttctatttccgcgactgggatagtacgaggcttaagagcttattatgtaggaatgtatcttttaactcgttgatgtcgcagagagcactatatttaagggtgatcttttttccaatgtgtggttgaccatttaggaatccgtgtatcccgctccacatcaataatcctgccgttgacaagtcgaaagtttggagggatgtaagggagctcaatgattgtgctatccgtgttaccgtctgattgcatagagtccgtttgaggtctgttttctgggaggttgtagagtgagaagtttgtattaaaagttttgcgctttgtaggaaaagcttactacaacagtctctgactggactaatttgcgacgcttttcccttctccgttggctttggattgcaatctggtagaggccttttgagactagatgcaggcttggtattttccggctcatataccgcaggttcagtcagcctataggagttggtagtatttgggatcgtttgctgtaggtcctcgtctattttctgctcgattttcggtccctaaaatgcctgtatgcagtttggtagaagtaatcggagtgagatagaagataagcactctatagggccgatttgttaaacagatatagacgagtatgtgggaaaagtatcggtatataggttttaaacttaggttggtgctattttgtttaaaccaggaggatataaaaggacctatttatactgtctaaggtgcctatcgatcgtaccttgtgattgaactaaagtaactaccagtacctctcgctggtggcgatgatatgcttgtcgcagtctgggtgcatagtcttcggaattgtctcgtataagtagtatggccgagatagccaactttctatattaagcaatatcgatctatctagacggggacatcgacatcgatgtccagtcctagggttccctcattctaagctgtatgtctatgggataaggcccagcctaagggtattaagtgtatgggtgtctgggtctaagataaggctgatcggcgaagctggggattggatggctatcaattgttcccggtaagaagctatatctggctgctgggtggtcatttaaacctacgtcagcctggagcgtcaatcttttgagtactagggttgagtatggggatgatcggtgaagttgcggatttgaatggctatcaattacccttgagaaggtgctatgttagtggttttcgcgtaaaggcctatctagctgcctttagggcgtaaagcgaggctcgctggaatcaaaaatagtgactctcgttttattgaagggttctgtggaggctgtacacttgtggggaagacatcgaaatgtataattcagattgttgattgtcgataaagctaatactgaagaaagctatgtaatacggaagaactccaatatccttgctaatatatgttacctagggcagattgtataaggatgatatcctgtacgcgttccggcagggatatatggctcgagataggtggagcattgagccgcgaagcagctattctgatcgagaacgccctgtaatattagctgatttcggatgtataagcggacagtctttgtgcttacagaaaagaagggccgcttgatataccctggtctctgcttgataaatcactacgtcagtcattaagcctatgaaaaaataatagacgacctactcatatacgacaagcttcagccctccaatgcgcggatcattctggatattacagataaccagccgattctgcaatatagcaggaatgaaacgaccaaggggagtaagtgaccctcctcgaaactccaccccagtggtagtctcttcgtctcttgcgctttcgtcagataaataagttatggtgctagcggggtgagactcacagtggtatgccttcggtagagtattcttgccaacaaatgaagaaagcacagcttaggttggccattgggacgccagataggttaaattctgggttaacatcgataattctaatgttgaagaatgaaagtgagggtattccggtaagcctgttttgtgttgagagattttgctaaattatagggctcgaggaagaggccttatggagtaaatgaaaatagagttgtttggggaaccataggtgcagagtgaggagaactatatattcaagctgtcagtggacgataggtctaggtaatgccgcgagatttagggtgattggaattaattctttctttcctcaaaatcattatgtacaatacccgctgacagaataggtcgttgattattttagtgcctcacgcgtgataaccggcgtttggattacgaattggtagagaggcttgaggatttagtattttccggctcatttatagtaggtttagtcagcctataggggccggcagcaattgaggtcgtttgctctaggtcctcatttattttccactcgattttcggtctaaacaaaaaaaattgcttgtgtgtgtagctttgtagaagcaatcgaagcgagatagatgacaagcactttatggagccaatttgtcaaatagattcaaatcatgtagacgagtatgtggtaatatcatcaatggagaggtttcgagcttaagctggtgcttctttatttaaaccaggaggctataaagggacatatttctactgtctaaggtggctatcaactgcgcctggtcattactaaagatctagccatggtgagtacccgcccctctctctggtgacgatggtatgcttatatcagaagcccgccccgattcctgtccaaatcctctatgggccggcaaaaattgctttggaggcaatgctcttcttgagaattgtatctctatcactcttggaatggaggccctcggaaaacctcagctaagatgctgaaatgttgctagatgcctgcaagactctgagaagcaggggatcctaggaaccctatctcgaaaatgacttacacctccacgtgggaaatatattacccgatctcagttatggtgctgttctaatgctagcgctgatgacttggtattttgatgctttatcttctaaagtatcgcagggcttgattgttttcttgagttggccttacgatagtgaagtgaagggaatactttaggatcgatattgaagtataatgtgcggaatggactcctcaaacttcgactttttgcttgtctggaattgagccctacctagtgatctgtgtaactggtaaatatgaaatgtattatatctgctttgcttagtagtaaccgagctttctgaaacggttataaatatcatcgagacattccttgtactagtcctttaaaatgttgtggatcttaaatccgagaaccttcccaagtttgtacctttttgtatattcctgcaggtatttggaatgaaggtgctggtaacaaagagctttctttgagttgagatcttccactggttgttgcaaaataatcggattatcgccgctcagaggaacgaactttgtaatcccatattttcctaagacccgtgaaatactaacctcaagtaccgtaagatccactaggaatgctttatgctgatcgccaagctcttgaagagcaatggcattaaaaaccatatcatcgagaccccttcttttgatgtcttccataagtgtgagtctattgggatgaaactaaattcgtacggtcttgtttggttagagcttgtgttaatgtggagaaagggtgacttatatgtaaacgaatcggtactgagtttttggcagaaagactagagtctttcgtagatttatgtatgttacttcgattgggatctgggcctctaaataaaagcgtttcgcgcgagttgcctggggaaaagaaaaaggaggatatgcagttcgaaaaaatataacgaactctaggtaggctcaagtagactatggtcttgcagtcgtgaaatcctggttaatgattcggataaacctgaggaacagtagtttatatcatgatgatctagcagacttgtcatttcttttgcatatgctactgattataggtctaggacagtggcttggggctctgaactacctggtacagcgaaataaccgtttagtctccaaaacgatctatggctggcgaagcgatccgtatgtgtataagtagaaactctactttaagatactctatgcctgaataggtttagatctgaggttagctccgttccctgaaatctaagcctttttaggataatccctgtactcctatttagataaataccagctccgctagccacttagatttcctttcctaaattgaaatgcatttaccggaagaccttagagaacagcttacatttgcccttggggctgtatcaccgatatatatcatttcctaggtatcaaatacttttaaatttacaaaaactgtttactactaagttaagaaaagggctgggatgggctatttaaggattttttctcaaggggaataaagaatgaattatagtagctgctcctaagagaatacctccttgtactaacgatatcgtccgcctcgcactcagctaactctggtccgagttcaagtcccgattgtacctttgctttcggcttagttgagaattctagtaaggccgcagcgagcgaagtggtacgcgatattgttctaataccaatgtcgaactccagccgcggcgtgaataatcctgtttgtactccttcggcctatgcttaaagacctatctcattttcgagtacctgtaactatacctccgtgtacgattttacgcctaagccgcgccccaggcctgagtcacccttacgggtttctaacaatgtgcttcgagctatctatgctatgtgtgaggctaaaaggcatgatactacctattatgattctatctggcttggactgcagaaaatttctgatgactaggatgttgaagaagttgcattgaatcgatatggccggatataagtactgtagtccaggaacgatgctaggggcgatatgttcaaatatgcccagcgtttcagccttttgcttggagcttaagaattgcaggttatagagaaaacactactaccggatgtgtgctctaggggtgtaaccctgagatctgctgcaattagcaaactggccgaatacctcctcgttgaaaaacgacgtatattagatgaaaacaagcggcgctctcattacgtttcagtatgtgagcttttcggccccggtgccctttttttgcttggagattctgatggagtactttctctgtaggttacctaatgaggaagagatagcccatttcctgttcttacggtttctagatgggaaagagacctgaatgctgaagatatggaatctttatacaaatatgtcatatgtcatcttaaaaattggatggctgactgtaagaagttgaacgaaaaggccgtgaccttagtgattgaaggactccgtgcttgtgggtgggatggacgcttgtaccgtgataccacatttatgaaatgcttggctggttatgtgaatctggaatctttactctccgtggcgactagatatgatgaagcactactaagaaaaaggaaatatcccgataaagaggtatcatcgaaacgctatcatcaggatatataccatgatcctatcttagatgaggagtatccgatatctctacgagtcgagttaaataaccgttctggtgattagtttggggaatcgcaatcgcaatcacctggaacaaattttggcacaacgcttgactgggactgcagtatcaacttgagcttggattgggaccagtttattgatgactagattacagaaagtatgaatgtatgattcgctggggattcgactggaggcatgagggccattttataatcggggatttcttaggtttaatcatcagaacccattggaaaagacaagaccaggaaaatccccccgccaccaggggaatggaaatacaccagatctcccctccaggccacggcgtctcccgcttcaaggtccaatgctaccttccttccaaggcgcgatctatgttggtgagacccttcgtagaatgtaaaccaccgatttgacggcgatagcctcgtaattgcgatggtgacgtatattctcggtccagctgtcatcagcttagttgggtcggcatctgtttcgtggaacatcccaagattcagggtctgcggtgaggaaggagtttggtttggataaaatagcggagcgactaaatctttgtccatattctgatcggtcagcgagtgctagcatggaaaaggagtgagtgatagataccctgaggaattcatccttgatttcgaacccagtctgaggtactttatactcgttgtatttgtcctttgtggcagttggtacattgtggatgagtccattttggaaatcatcggcgagttttgatgcgactgatgctgatactgcctgcctcagcacgacataaccgttcgaattggccatcgttctggatcgaccatgagagttggttttaaagacctaataaaaccaaatagccttcattagagataaaacagaaacttatgtattgtcatattaccttatagtatcgtcaaagtcgctcttgggggatttcgccataaccttagcactgaaaccccgcgatcaggaacttcatgcccaattctctgcttacaaagaactcggcggcggggtacaaagatactaagatcacgtggataaaacgtctcgaaatcttgagacaagttaaagcggtacccgtgcagaatctatgggcatctgaaaggaataaacagtagaagaagaaagaccaggctgtgcacacacaaattccgtcccacaatgttggcaggtaaatctcaagaggccacaaggactttcattttgggcatggctggcgaaaccggcttctctaacctcaaacggctaataagcagtaaagtatttaatcacttttaaaacaattaatcactactaaaacaattattcaactcgtctgctatattacatattcattgcacgcacgccgactatcgcgtatccgttccgctctgaagcgatgagtaagacctttccggagtcgccgcagctagccgcatacatgggcctgttgtatggatatgaggactctgaaccctcagaaaggcccaaccatcggtcggttttggctaagccttctatctcattgatccttgtcgtcgcctactgtcagccttagctgtacttaaaccactatttttgacatagtcagaagtgtagcaagcatgaatctgtttctgatttgataggcgctagaacatattcgatctaccagcatgatgacttattgtctctttggcatcgtgcgctttcgttgtctctaaaacaagacgttctattcttttcctggcagcagtaccgtactgtaaatgaaatcgtgtggtacgataactttgcggtgatattacaggcgacacgcggttcagaacatccatgtttagctctacatgattgggcgaagaggcaccagatctaaagatcgtactgtgagaccgaataataagggaaagcacccggaaacggagaatcaaaagagtttgtattcatcaatgtgtgtgtccataatacagtagctgttactcagatggtctctaggcagacggcaccaacaggctttccgaggcctaaaagctcaaactagtacaaaataggaatagaggctgatcggggtttccctgtcaatgcacattagggcaaatcgttgtatagagactaggttatggaactccaaagtggagcaagtctagtactagccattctcattagttggcaagagccaagaaactaatcagctagcaatattcaagagacgatcaaattcaaggagactcgtacgaaaatagaaaataaaaataaaggagannnnnnnnnnnnnnnnnnnnnnnnnnnnnnnnnnnnnnnnnnnnnnnnnnnnnnnnnnnnnnnnnnnnnnnnnnnnnnnnnnnnnnnnnnnnnnnnnnnnnnnnnnnnnnnnnnnnnnnnnnnnnnnnnnnnnnnnnnnnnnnnnnnnnnnnnnnnnnnnnnnnnnnnnnnnnnnnnnnnnnnnnnnnnnnnnnnnnnnnnnnnnnnnngacttgtacgaaaatagaaaataaaaataaaggagaattagcagcagtttcgtaatgggcgtctcgccgtgaaatgcaacctgcgcacaaaaatttcatttgtacaccaatcagcgtcaaacgtgcattttggcgcgcggtaccttctatgcacgtagacacatgcaacaccaacttggcatattgacgagaatggtctgagccatgatgaagtccttgatgtttctgctcaacatataaagagacttgtacgagcgtaacagcccactcatcagacctcaatagctttttcagttaccacaacatttcaaaactctttaaatatgtctttcagtgtttacacggccgaatatcttggtgcacctaaccatgaagccatttacattgaaaccaatcccaccgccccccgaatgtctgaaagaggacgtctctatcatgtcactggaaatttactccagggtatgagatacgacccaagaggttcctttgaccctgaactctcggcgtcttatgttccaggcacgaagaaaattattggatccattgcacacacagatttgtccagatttgagacggagtgttgcagagcagtcgaggcgcctcgagcccagttgacgcttgggggtaaacagttgtatcctggtacaccactttatcgttgtggagactggttgcgagacgttcagaaattggcatttgaaaagggcatcttaaagcggtagaatgaggtaagtcaatcaagtccatttatcaaggtacaacctctgacggactggatccgaaagcaagcgcacaggtacttcagagcccttgtaaaagatgttctttctacagctggacgtatttcccaacatatcccgactctgggtcaccagcgcaattttgttctttcctcgtgttctcccatcgaatctatgattctcactatatgagcgggagattcacagtgagattagtttgaacgatctcttctctccggttggggtgttgaaaagaggccgagaggttggtttcgcgtacaagaaacgtaaaatgcagagtctatggctttccttttgacgactaagaccaatgttttatattttcccaatgtaccatcagtagaagaccgacgagtagacaacttgcatcattaggtattcaaccgggtactgatcaaatatatccgggataagctcaagccagtccggtttcatttgacaatacaaggttgaattgcaaaaatcccaaaattcggggtaccagcctgacaaattccagtcgatcagagtaactttgaagtctgcgtctccattgttgcaaaccccttttcgctccacaattatgttcttcggttgcagatctccatgagtaaagacaattcgatggttcttgagagtgcggttgaccatttctttcaacaatcgaatgtagtgtggagactgcatttggcccagtctctccagtattccttggttcatctgcttctggtccttgaatggcccggaaatgattgggttgttatcaggggttgaaagaacaccgtcgatgtaaggcgtgccattcaagttcccaaagtagccaggtgatggtattgctcgcagttcattgatcgcctgtctgatcctctggctgatcgtcgtcttctcagttggggtgagcgatggcagtaatttctgcaagtctgtaccagggacgaaatccataacgacatatcttttctgggtctctgggtcgatgaagttggcgtgaacctttggcacaggaaccttgctgttggctgcaacaaatttcacgttctcagcttccaaaggcgggatcgaatacccgattttgaccgcgaagcgttccttcactcgaaccactttgatggcatttgttcgtatactaaggacatcggtcgatgttgattcatctgcttctggtccttgaatggcccggaaatgactgggttgttatcaggggttgaaagaacaccgtcggtgtaaggcgtgcaattcaagttcccaaagtggccaggtgatggtattgttcgcaattcattgaccgcctgtctgatcctctggctgatcgtcgtcttctcggttggggtgagcgatggcagtaatttttgcaagtctgtaccagggacgaaatccataacgacatatcttttctgggtctctgggtcgatgaagttggcgtgaacctttggtacaggaaccttgctgttggctgcaacaaatttcatgttctcagcttccaaaggcgggatcgaatacccgattttgaccgcgaagcgttccttcactcgaaccactttgatggcatttgttcgtatactaaggacatcggtcgatgcctcaatgtcggcaatagttggtagttcaatgatcgattgaagctcgttatccatctcggtgaacaaaaatgatgccgccgaagtgcaacaaaggatttcacgggctttatgtattgttcgacaagagcaaacagtgcaaacataacaccgtcataacacgtgatgaattccagtcggccattggtttatcacgggaaaagaaagggcttgccgcgagtatgacaagcacgaccagcgttaggcccaaatttgccagcatcagctgatactgttatggactttgactgacgtgctgtaccctgcataggccccagcgagttggatttcaggtcacgtgacgtatatagatctgttggggtggagtgaaaaatgtataagtcgtgcaacagaactattgtggatcctcacgaaaggatcagataacttgaatggacagagtgatctgagaagactaggcagtctgagtggacagagtagtctagtgttactcccccaattttgttttaagcggtacttcgtgcgtgattccccacctcgctcccaaccactccttgaaaagtaattgtattgatttgatgatatccctcaactacccccttggccgccacaaatatatggtagaagtgtgcctgtcagtaggcgacgactacaactaccgagtactttgttaaccagttagttagttaatgcaaaggaggcctggcaacaacgcgaccttagtatctgagaaggtctatcagagggtatgccacgtagggtgctggctattactgaatcttattgacggtacactgaatattagtcatttgaataattactataatttttgtgcggtagaataatggcgggaaatggcggtgactgagagggttaacagacatggtgctgcctactttggtctagtggcaccctcagcgagagaaagagatacgctaaccgcattttgaccatctccaaaacacattggaataccaggtacgtgagccagggcaatgacgtcgctcgaccttacaggtggggatcagtgggactaggtggagattcgggactgccaataaaataaaccatatgccctcaagaatgcaagggcttcaaattggaccgactggttcggattactactggttcggcgaagctgagcgttgaagtcggcatctcaaaagatgaggcatacaatctgttgtacataagacacctgcctaaggctttaattaagcattggtgaacggtagtcaacggcggggacgagatagtcaacgcatcaaagaaatgttgagggatatgatgagacgatagttagctcaatttttttgagcttgatgaggagacggaccgcactttattggcattatggaaatttcagaacgtttacacagtgggtaaagacaaggcggttatatttatctggcatcccacttgatgcggaataaaggatcgttttcgtggaagttgggcagtggagaactaaaaaaaaaagaggcacccaatgcggctggtataatccatggggtctctaccacgcaaacttcaattgaacaccagactaccgagaagctatattccttagcaaattgcgctctttctcatgttgaacattcgcttcttgtacgtaacaattctctcccttcggttggcttccgcggataacaccatttttagttgagttctaccgtgcaagaggaacgacaaaacagtaacttgtcagccctagacatacatgctctcaacatgactctcctcactgaattccttagagaactcttcactcaattccgcagccatttccaggtatttgtagcttactggttcttcacccactgtggcaagagcatgcgcaattgacgtgaggtttttgatctgattatggtcagcgggttcataaactatatggctcgcgaaagcttctggaactttcgactagcagactaaccacgtattgcactccctatgcttgctcctagaatagcaacctaaggccaatagagaacgctagatgacgcagcttttctggcatttacaatgacctatagggaggacactagtgaacatcagtaaaagcagcaataagcgcagttacttgtttgccatacagaacttgaacagaagacttgcgcctttatgcattgcctctttagctgttaacgatttacctaaacgaggctggctcaccctagcttccctatggtagtcgcccgcgggagaaaatcgacactggcatccaggtcaagaagcgatgaaggtgctcgaaacacactgagtgaggtgttgccaatttcggtctagtggcactctcaacaagagtaagagatacgctaaccatatccggccacttacgccgacagggctgttaatcggcagccagtagggttactgagtaatctggagcttctccaagatggagcaagtagaagtcaggaaccaatcacacattggctcctctgatccattgttactcccccacttttgttttaaccgattttgacggcccagattctccatggcgccctatcaatactgaacagcccacgctttcttatgtatatcgagtccaacccgtgcttgactatgatattactctcggcttatcctactccgatggttttggctacagggaaatcaaaacaaaaaaacctcaatttccccggttgctaattcgtgaaatctagtcactaaccgagcatttcaatgtagctaccacagaagggcaaggtctaaccgatttccaagcgcctgtactgtctcatcctcttcctctcattttcatttagttttctggtatatgaagggtatgccaatggacagatttgaaaggaacgaagactgaggtctcaactcctgacgctgacgttggctcctcgatccagtagcatgtgcaccaccttttcatggcctccgtccgctgcggcctggagtgcatttccatagcgtccaccctgggcgttgacatcggcacctcgatccaacagcatctgcaccaccttctcatgcccttcctgtgatgcggcgaggagtgcactgccatagaattgggcctccagtggtgcattgccatattcatcaaactgggcattgacgttggcggctcgaacaagcagaatcttgactacctcttcatggcctccaactgatgcggcctggagtgcattgccatgttcatcaaacttggcattgacgtcggcaccacgatccagcagcatctccacaactttctcatggcccccggctgatgcggcctggagtgcattgtcatataacttaccctgggcgttgacttcggctcctcgatccagcagcatacgcaccacattttcatggcctccatgtgatgccgcctggagtgcatacccatatgttccaccctgggcgttgacatgagcgcctcgattcagcaccatacgcaccaccttctcatggcctccctgtgatgcggcctgaagtgcattaccgtaccgccctccttgagcattcactgtatccgatgaatcggcatccctagtgtcaatcaggaagatactgctcaggacggattccaatcccagcaacgctgcatagtatagaggcagtgctatattggcaaagggacggttataatccacattcatattccacggacgatccatgtcatgcaaccgtatccaggttacgaaagccttcatgtcgtctttgaaaagctttgacagtaatttttcgattgctgtcttcccttcttctgagtttgcataatgatgaaaccaatgtatggctgcgaaatgagcaaaagggaactcggtgagctttgcctcatctaacagtccctcagagagagctggctccaggaggtagaccaggcatatctgagctatttccgtattcgcaggcgcacttcgtatagcaaatatacgtgagttttgttgtaagatgcgatccgacaggagatactcctggactgagaaatgcgctatgcgaacagtcacagtggtctgcctattgtagtcttccgtggctgcggtctcgataagtccgaggcaaatgtcgacaaggtcatcttgctcatacgaacgaccttgacgatcaagccgcggtagctcactgagatcaactgcgtgtgcgtcgatgagctcattagccgtgagcggtcgggtggagaagcaaagtagagtcaaaacccgccgcacgtcctcgacatattcttcgtcgatgttgcacaagattcgctcgtatgtctcatcgagatcgcggggcaatgttcttagacatttgtcaagctggatctggttgcggacccgacttatggctttgaactgacactcgacatatctgaacctagaaacggttttagtcaaaacggtgggaagcatgtctccttattgtgcttacactccttgtgcacttgttgtcaattttgcctcaatctcattgtggcgcgctttccacctctggagtttctcgtcgttcttgagctgataagagacaaagtttgctatgtctctgtcgacttccgaattcctaagcgaaagatcttggtcgcgagaaggatgtaacgattcgcggatatctagctcgttgcgacttgtcaccaaaagatggaccccaggtatacaccaactgcgtatcatttgtatcgctcttaagacgccttcccttttggtgtctcgtgggctctcgtctagcgcgtcgagtagaatataagtatcgcagaatcgttcaaggaagcgtcgaagtgagtcaagcagcgcatgcgctgggggtgatccggatctgtgcaatgcatgcagctgttctagatctctctcgccatcttgtagctgtaccgatagctgcaacagcaacgtgcgtaacatgccgttgtcgtcttgcttcgcctcgtcgttaaaggaaaagtagaaaaatgcgattccgactccatgtttatgtctcgtctcatgaaatgtatgctggattgcgcttgaacagaggaccgacttgccacatcctgcgaaaccattcagccataggaaggaattacactcctctagccaagtccgaaagtaatggccgttgacgaaccatagacctgtgcttggatgacatttcgcgcacgtagcgttgtgattgagagatgcatctggcgccataagccagcagcgaatcgtgagtgaaacttgactagcatttgttcgctcgacaagagatttgacttccgatatgccatcctggatctcgctatggctttttagctgtaggacatcgagtgcgaatgacaggttttcacgtatgtcgctgacgtcttcttcgagtttctgtaaggtacttttccgaaacggataggccgcgcgacgtccagcaactttgacacgatactttaaatcggcggccgagtctttgtggaatttctcacattcgctctgtagctcggtgatgatttcctcgcatttctgtaccgccttctggacttctcggagtagatcttgcgtgtcggccttcgatcggcgttcctctacagcaatatcgaggcctcggaaaatgcccagaagattgtcgagattctgcgtaacctttgccagatccgtgtcttggcccttgtatgtagtgtaaaaactgaccaaagactgggtgacttgaataccaagcgaaagtagtccggcaacccctgatgcgatagcgagcggatcagccattgtgattgataatattccttgagacgggggatataaccatctaaatatgtgagatagccattatctcagagccaagcttcagcctcatcgagcaggggctcagctgctttgatgcccaaagcggggctgagcatgggcgatgataagaatagaatcgaatgagagttgtatcagtatttccaggaacttaggggatttgttatcatgtgattgcgtgttacaacagattacggaattttagaaaggaactaaatcaaagatagactagcgtatatcctcgctttgtgcaagccggcgactggtgcaggagatattgttctttttgaggagcagtgcgaaaaatttcaaatggttaaaagagccaatgtgtgattggttcctgactactccttgctcattgcggagctacatgcaaaagcgtagcgcgtgattttctttcttgtgaactaaggcaggtctagattctggtggactcgcatagacaatggtaagtaccatctcactaagtgcccatcctgtggtcgaagggataactctctagtgacgtaagagatgtgcaatggggtcatcacggagaaccacgtgattgtcacactaaagtacaagttgagccaatcagctatatcggtggaatgaaaattgccagtggtttgtctgcactaacttagttttgggccaagaccaggcgaatgtgcgccaccatcccatagcacctaccattgtcttcccgcctcttgtaggggaaccttgtcgcatgggcacagttttaaatgtggaggaacccattctacatgagtttcataccctccctcaaagcctattatcagtttgccagatcgtcatgcctcaacacttggcactgtatcgctctaccatcattccgaagatggatacagaattagtccataaaatttttgcacgagacgaagccgaatctgctccgccctgttttacgggaaatgaatacgatggccggatgggactgaggatttcgtctatatttgtgatattggttggttcgattttcggcgccgtcttccccgtcgttgcaaggcgatttggtggttcaggaatcccatcctggacatttttcgttgccaaatacttcgggtctggtgtcattattgctaccgccttcattcacctccttggcccagctgaggaggctttaagaaacagttgtttgaccggtgctatcacagaatacagctgggttgaaggtataatcctaatgactatcgttgtcatgttcttcgtggagctgatggtcatgcgatacgcacggtttggccaaaacgatcagcgcgatgttgagaatcacatacattcacacttagacgacgatgaggatgccactactgatgagagaaatcgagtggtgccgagatatgataacttggaccgaccctggcggcatcaggatactgaaatgtccgaaaaaaccggtatggaagggtacatggctcagctgacttctatcttcatcttggaattcggtatcgtctttcactctgtgtttatcggtttgactctcgccgtatctggcgaagagttcacaacctctacattgtcatcgtcttccaccagacttttgaagggctaggtttgggctctcgccttgctacccttccttggccgcaatcaaaactcctgacaccgtatattctggggctcgtttatggagtttccactcctattgctattgccattggcttgggtgtgcgtaaaacttatccaccaaccggtcgaacaacgctgatcgttaatggtgttttcgactcgatatctggaggaatcctcatttacgttggtcttgtcgagcttatggcgcacgagttcatgttcaccccttctatgcgaagagctccgattcaaacggttctggcagcacttcttttgctctccagcggtgcggcgctcatggcattgcttggcaagtgggcgtaggtcgcgttcgatcctgtttattaacattttccggccttgactttgacgaaatgcaaactttcaaaagattctctgccgatcctgtttcccccagaacctggtgcgacccctcaagtagttggcagttgcgacgtcgcaacaccagggctcgtcgcaggagacccatgattactgtattgcgtcccatgagaagatgagctgtgttaatcatgttacgtggttcctttgataagggttatgtgcatggtgggatgtatgacgtgtgtccgcagcctggtccctcttcttttactgttcctctaagagtctcatggattatgcacggtaccgctttaagttgtcaagtcaaaggtctttccacgcgagaccaacctgaaatagtcaaaaatgaatggcataaggctcggactgaccttgccatgtctggctggtataagctggagactacgttacggcacttcaaagtggagctgggagtaaaaatgggccaatcaagtctctaggatcgactagagtccccagggctagtatgtgtacagcaaaaagagacatggaccacctcagtttggaaaaatgaggaaatactgatcccaaagacacttctgttgatcctggaatggccagtggttgctctaggagctttacgtagggttccaggagcaatatagctcccaggagaggtgatctatagacgaacttaacactcctgggaagctgacccccgatcctgggagctttcaaatcctcctaggtgtaaactcgtccatccccggacagaaagcttttgagggactctaataaagcttccgcgtgcctgggagccatgccatggatcctggggtcgaatatgatcccaggaacgtgaggggtctcacgacctaaaatgtgggctccggaatgggtaatcaatattaggaatacaaattgaaatacgggcaataagtgtgggcaactgaaagaagaggtggttaacccgttcttggggaccgagccagagcaatgacgtcaccgaaccttatcggtggcgatccgtggggctcggtgggactcaggaaccaaattagcctatatgccctcaagaatgcaagggcttaatattgaacaacacgaccgcatggtctactatgtcagctagccatatagggacggctctggtagagggtatatcaccgctaacgccggccaactcgaacactactaattcggaatataaccagttcgtgttgaagtcggcttgtcaaaagatgaggcatacaatccgttgtagctaggttacttggctgggctttaattaagcattagtgagtggtacttaacgatggaacgacatagccaatggatcgggggaatttttgaggcatatgataagaagctatttagctcaaactttttgaggttgatggatcttggggaagatgaagaaatggttgatccactagataagacatatctccgttcagaacattatacatacgtgctgatattcctcaattccaaagaaaagtgcggtctagagagtgggtaagaatacgggacaaaggatctttttcgctggaatcagcaacgaagaataagggcgtatatattgaaatataaggcatctaatgcagtgtatctacacaagcttcaagtgatggtaatgaagctcctttttttggatgtgagtggttatctcttcggcatttttgatatatttctgcgggctccctgattctactagtacactttgccatcaacctgctcaaaactgctgatactgtcagagaccaccaggaccaagcaaggcttgtccctataaatacctcgtagacgttggccctccaagtattttttatctaatgatcattgcaggtcgtgtcagcgaacgagtgtggtcgaagctggtcgtccaaagaaggagctctgatcgtgtcgaatttcgccattcctggccacgcgtaggtgagcgaaaggccatcaagcacagacatagtgttcttgcaacagaaatcttcagtagctgagaataatattcatcttctgggttgacttcgctgttgggatcacagaaaaagtaataaagcgtgctaggtgtatcacgggaacatggagtaggacacgggcaatcccattagtcacataggaatactcgagtccttctggatcatcacgcgatattcctggacaagagtggagcagacaagacgctccgcattgtacctcagcttcgcttcctggtctgtcgggattttgtcaaccagagataggagatccaaaacgtcttcgtgtgacgtgaggcagtgtgcttattttattggattagcaatacaattatgcatgataatgaagcatgaagcatttccggcccgcatccgcatgaatcagtcagaatttctatctattataattcttgatgcccgcttctccaacgcacctatatggcctctggtgatatacgattctatatgcattgacaaccacgaattgatcatccaattctggctctcgaacttgacttttgtgtgatgccatgaatcacatgaaaaccttaattcaactatgaagcttcaggaccgatattatggactgtcgtgtactaaccgaaaatattgcgataagcgcccaaccgctcgacaacctcgaggaacgagattgtccacatgactttcccaggtatgctattagacatacattccatcagcaggcctctctctgccaaactcctttgaaaatttctcatttgatttggcggctaacttcaagtattcgtaattcacctggttgacgtcagcctcagcgagagcgtgtgcaattgctgcgacgtttttgatctggttcatgattggtcagcaattgagatgttcagtgccactcggacacccacctctcgtccattcagagctaaagactccaatcgtcgaagttcgtgctcctcaacaatggcaggtccttgcatcgtacatgccttggacagaaaagttgaccagagatctctgcgaaactctctcgttaaattctcatactcaatgatcaagtgaatccggctgagaattgcgtcatcaaactggataccccgattggaagtcaagaaaagaattccttgataatattccagctttcggaggaaaatggtcacaaggcgattgtgggcatcgtggtaagatgtacgctgctccatgaacgcgtctgcctcatccaagagaagcacggcattaaagtgtttggcgatcttgaatactgtttcaagttgttgctcaagcgcattggaatccccgtggttgacaacaagttcgcctgcagatatctggaaaaatcagtgacgccaaaatcagccgagctggatggttcatacagaatagagggggagtttgaaatactccgaggttgcctcaaccgtgaaagtctttccgacacccggtgggccactaggacaagttaggttgggaagtcttgattcatagacgctttgccgacatacttcagaagaatgttgaatccttggccctttccatcaattacgtcgtcgaacggtaccgtcggtatcatccctaggcgggttttcgccaatgacaggaggatggtcttggtctctgaagggatcttcaggcaatcgaacgattcgggtgaccaatgcacgtccctaagagcactaactgcgcactccactggaatcacattagccggacaccaaaccatcgtcagtcgtgtcacatacagaacattttctccttgaaactgaaacagcaaactgttgggcaggcaaccagtaaatcggcctctctcagcttttgtgcatccacaccgtctcctcgcattttctccttctctcgctcacggccctccatgagcattgcaccaatgtcaaagactgcaattccatccttatccttgaccccaatgtcgcggagtgacggtcgggagtagtttggctgcatttcatggaaaaatgcggcgtccactgccactcgactcttgatgttgactttgatagccttccccttgttcataaagaatgcactgcctttacagtgccgaacgtgtgagccggctaaatcccgaaacttttgacccctctcgatcaggtctttccggacttgtttgtgattttgatagtgatggagagggaaggcctcaagagtctcgatcggctttgacccccgaaactttgcaacacgcagaaagattccggcttcgccaaacttgattccgtcataatcaaggaatcggcactccagattccaccacatctcatcattctgtgtgacctcttcccccgcgtcgaatacgacacatcgcggctcttttgtgccaatgcatctggtataaacatggcaaccaggcttgaaaagcgcccaaagaaggtcatatgtaatatgaccgtgctgcaacattgattcgagacgctgcgagatagccgcatatgcttgcttgaggtggtcgatgagcaaacagagatgctgtgccgctgtcgatctatggtccgaactgttgtccatgttctccgcgcgtctgtcgagctctgggaggaaatggaaaaggaaattttgctcgatctaaatctacgtcagcgtgctccttgatgataatactgtctcaattaccgatggcttgtcctccatcaggctaacggccttgatgtcgtgcagcacgtctcgcacgatgtcgcgtaggccttccgacttgatgtctatgaatggcactacctccttggacgtccggtctgatcatactattagtaggtcttcggtccggcatgcaaaggtgtcacgtaccaacacgttcacggacaacaaatgcatattcagcatagtcatccaggtcattgctagtctccgttggctcggcaatcttgtatttacatgcctcttcgtcccagctagacccgtgtcagctatctgaaaaagtggaaagggtggttggctggtggctcatacgtttccacaattgttttggattgggattttgatgcccatttctcaaaagacttgaaatcctccggtgtagtacggatcggattttcgagatcaatcccatctgccgcctgggcgttctctgcctgctcatcgctggaaaagcaaggccgagaaggctcagaaggctcatttgccacgggaggctcagctgaagaatatcctttgcggatgaccttcactaacaactgcttcagttgatccatatctgggcctggttgggaatggtcctggaagacaggagtgtttggaggttctcggttggtaagactgagcagcacactttcaaagagatgcttcagatcctccacggtatctcgaggcgtggtcgattccttcgttgggctatccggcggcgtcatgccttggtgacagggagacgaagtctttttcgatgccatgtgctctgaaagcaatcttgggctgctttgaacaggtgccatgctgtttgatggaatttgtttgtacgatggagaagaaagattgaatcaacacggtaaaagctgatatgaatgtaaacgaagaactcaataaggccgagaggttcctcccattttatatcttcgttgcccacccctgccccatgtgaaaccctttaacaactttaacaaaagtacgccgcagatcgcatgaacttggatgaacggtcttgaagggattgagttgcttgtgggagcaagcctatctctgccgtcccagacgggacggctaaggtggataggcacaaagaatctgcacgtctagtttcgagaatgcatgccttcaagactatgacgtaagaaagagatgcgaaatatcgtcgaataatcagcgatatttcgacgaaatttcgatgaatttatgcagtttaatcttatctcggatagagatttcagagggagtaaataattttacagagacttgggaaattattccaaggattctaatttattgttcttattatgttgatcttgaagagaagaaggcgaaaacttttggtctttaagctcaaagattattgtcattgttgcttgatcaggtcttgacaggagaccagcgcccaacccttcgggcaaagacctttgtcacgtgataatataaaggcggatttcttcctgcccctcacctgcccactcatctatttaccagcaatgcgctgcttgactcaaaggtgatacagccccaaatgacagtggtcattaatccttgacggaaaattcgtgttacttgaaaggaaatagctcaaaagcaacgtcgttggtgattatccttaatatcatcggactaagcggcgacgtaagtcaagcacgttcacttctcatctggcgtacgtgtaatgtattctaatatacaaaagcattcattctccccgggaagtttggattccaccagaaaagcgcacacagagaccagtaccatggataaggcagccaaaaaagttcgcaccgaaagctcatcagacagcgggattctcgaagaatgcaagaaagaagtgagaatgatatgttagatgttcatctgtgagaagaatactaattaccccaggtaacatgtgacttatgcgatcgaataaactggacgactccatcaaaaggtgttcagactacccctccaccgagaacggttgcaattgtcgtggatgttgttcagaacagaggcgctatacggattttccagaaagaaagcggtgaatacgttgacggagttggaaccgaggaggaaggctttcggatcatcattccatggagagacacttggcgcttcagagcatcgggcgtcgttgaagttgggtatataatagcaaaggatgcagattagtttggcggctggttccatgttgccaatggacggtgtaagattaatcgatccgtcagctcgttactgactggaattgtaacaaaagatgtcgtgttcactccatacgtgtcagtgagccatactgcgcctgatatctgaccagattctatgatatctcgaatatcttgcaagttgagctcatagacatctccggtcaaagggtctttaggtcgatttagctagttatcatccacttcgtgccaaggacatacctatgtcttgctgcttcccgggctgaaatgtcgacaaatccggcgatgtgactactgcaggtggtccttcgccatgttagctagtagcatgacccacaagatttaggtgttatactgaagatcggctgaacgatttggtagcttccttgaccccgctcctgatgctcgagagcgtcgtgagtctcggagacttgatggactgttccatcaccggcttgtaagggagcctggggagcttctgggtagagagcaaaactgaaatactgacgtgcaagccatcggagtacagggttgtcaaggtcagagtgattttggatctcatatggaagatcaagccgtatactctcctttgcgatggaaattgtcgaaagtcccaagccaatagcacaaagaacgaccatcgatgggccgttcagctgtcgaaccttgcggaggaagtcgagataagtcgactgtcggcctgctccgatggagtcctggggtgggtacccattcctcagtaatgtggcggctgccttgattcttttcctttctttttctttcacgccgttccgacgctcaacatatcttgaagcctggacaagcttctctaaggcactactaagagacagagtcatgcttcagaacaatgcaagtggagttttcgtcgaaaaggagcgaagagcgagtcgatgaaaagcgctaaataccacaaatcaatgtagcaaactcgagctttcgatgtcaaaaatcagtcgaaaatcagtcgaaaaggagacgaaaaggagacgaaagaccgctcttttaatagccttccccagtaaagtgggttgcagggctgtgctcttgtggatcgatgggacactagcgagtgcgtgcagctctcaccactcaggacacatacaacgccgtactcgtcattggttgatgctctttgctctgtcagcctagacacgctgaggcccgaaaaagtggggcagtcgtccaatttctggcttgagtgaaaagatcacagtaccttagtccaccaatcccacacgtgctaggaatacctcatctttcggctacgttagaaaaataggatggcgcgaggtgccacaattggatctcttctcccaccgacgtagccgctggtctagattgtgggtcaggcgccgagaaaaggctggccctgagacgcccatccgctaatgcatagtggtcacctcaaagcactggagcctctttcactaccctcagccaatcacggcatctgttgataggtgccgcagaagaaggtgctatgagcgactgagccattgtacaggggacacggtattcacatctcgtaggcagggatccccgctcgacctgtgcaaattcgtcctgggatgttcgtgatctaaggtataaatatcgcaggcaatagcgcaagggaagaagagcaccataaagagaggtcgagcagaacaagacagggcgggacaggacggaacggaacgtggtaaggtaacatgactctgcatcaccagcctcattggctaaaacccgctgagtgactatcatttttgtacaatcttcagatatctcccaaccagcgtagccgctgactgggtccagcgcccagcggccgccgctcgctcaccttgggggcgcaggacgcttcctctagagactccttataagtggcttgctaacatgtcacaggatcacgctaatgcatgggcggtcacttcatgctctggaacctcttgaattttgttgcggatctatctatctccagcttatcacacccaattcatgatatgcgccgccaagtcaggctcgagacactgaacatcgtgccgcacaaggatcatctcaagacatggtattcatgcatctgatacaagttcccccgcatctgaaaggaaaagtaaaagaaagaaagaccagcctgtggacacacatattccatcccacaacgttggcaagtaaatcttaaaagccacgaggactttaattttgggcatggctggctaaacctgcatctccaacttcaaacggctaataaacagtaaagtatctaatctattttggtttctctccattatttacgtctatgttgaaaatggcgcattggcgctctccaaaacaaaacccaaatgggcatggttttgattcgcggacgcccgtgcagaaacagcatgtaactaacaatgtggctcgaaaaaaaccttgctgccacgtcagtatagtttgattggatgggggctgccaggcaagtcacccttggtagttgagccttgcataatagcagcggcctcagacctgcacgcgcatctgatttgttaagcttaagcgccctactaaatcccttcagccccatttcttttgtagctggccgctgacttgtgatgtgatagctgcataaagaggtttatttcggaagattctctcacgtttataaaagctggctcctcgacagctttggtgaatcttactcccaactgcttttctcagcgaccacttgaactagccaacgtttcgtcaattctattcaacagagctgttgcaacaatttactatcgtgaataacaacacaaagcttcagtcgcaaggtaaatactcttccctgttctgtgagaaaacacctgttgacagcaaccagcaccatcaaccacatgccgaacaagtggaacaaaatcaaggacgccgtccttaaacatgcaaatggttacaaaaagctagtgcgaccaagtgttggtctccacaaaaccgctttcccgaagactgcggcagatctcgagagtctaggagtgcgcttcgacttcgcaggcactattgaggaaaatgggaagaaattccacagattccaggttcaggtaaattcgggtaacaagatcccaacttcctggaagcagtggagacaaaaacacgaaaaagggacacacggaatcgttgcaactgtcaaaatccccgacgatggcactaaggaagatgtccaggcggctcttgacgctgtcgatagtgagatcgactagatagactcccccttctcagaggcctaagacatgtcgagttcgcgcatcccggtgatgaggccacttttgtatctaatctgtgctcagtcagcatccgaggccatttacctcaggatctacccatagcacttacagtggtgttccatgagtatttgaccttgggtacttcgggccccgtcactttagacaacctactatgtttaaatacgaagttgggcattaccagctattaaaattggattgaatttccgtttctgcgaggcaatatttgaagtgggcctaagaaatggaccctagaccgaagtacccaagttcaaatactgtatctgtcgctttgcgattggccgaatgggaagaatcctaacatttaccgacagggtcacgtttgtgctgagtaatacgcatgttagccagaattcggctacgtaaccttggaagtaccctagtgcaaataataatagcagcttgggagcaatcttggaactgacaaccatctgcttgaagatgcgacgcttttcgagattttttattccatactcgaagtcgttacccaggaggatgtcctctatgcgtggtaagcctgatctgttcgagtacacttctgggcgctttttgtgagtcgtgacggcggttagctgttgaacgcgtcaattgcgataaactgacttgatgcgtcaaatagatttaacgaagagctccgccgcgctgaacgccgtattcaattcgacgtggatgctcttgcaagggcggcctgccgttctgtcggtcgacatgtcaaggacgtggcctcgatcacaaaactcgcggaggggggcttcaaccgtgtcttgcaagtcaccttcgatgacggatatgcagttcttgcaagactaccgtacaagacgactgtcccgaaacatcatgcagtggccagtgaggctgctacactcgcacttctgcgtgctcatggggtcccagtcccaaaagtcctcgcgtattctccagatcagacaaacgccgttggaaccgaatatattctacttgaaaggctcgaaggatcacccttgagtgaccagtggttctccatggataccaaaactcgggtcaaagtaatgagacagattgttgatttggagagacgattcatgagcatccacttcccagcaagcggaagtctttatcaccgccgtgatctcgacggctcacaacactttatcccagtctcggacgatatcgtcgttggcccaactgcacagcatgaatggtggtatcgagaacgggcctctctaaaggttgaccgcggcccatgtaagtattcatccaggagtgcgtgttttctttggggatattgactctgagccagggaataccttttctgcatgcttcgaagcacccgccaagcgcgagatagaattctgtgaaagatttggcaaaccacgcctacacgtcgagagatacctacgagaaatacaccagttccaaaagctctcacctattccgtaccaacgtcttcttaccaattatttagagttagcgccctacctcgacgtcccatccggccaccgcatgtctcgcccgactcttcgccatccggacttttcacccaacaatatcctaatgaatacgtccaacgacgtggtagggatcattgactggcagcacgcagtcattctacccctctgtctgtgcgctggaatccccgatcattttcaaaattggggcgatccattgtccgagacattatctaagccagaggtcaaattgccagaaaattttgatagactcagcaatgaagaacaaggaactgttcaagagacgatgcggagacggattgtccatttctattatgctgcgttgaccatgaaatccctgccggatcattttgacgccatcagaaccgaaaactgtatgctccgagcgaagctttttcatcatgtacaggctccctgggaaggggactctgtctcgttgaagtatgccatgttacaggtcctcaagaattggcctatgtcgctggatggaggagcacaaacgagatctgttgagtgtccaattcaattttctggggaagagatgcagaaatgttcggaggatcatcgccaagaacaagagaaactacaggaactgggcgagatgagagatctaatcgggacagatgccctaggctgggtttcagacgaggatgagtttgaacggtgcaggggtatcatccagagcatcaaagacggtttgatggaacattcaagcactgagatggagaaaattgcggtcctttcccatttccctttcgatgaccacgaagaaacagaaatgttcggaggatcatcgccaagaacaagagaaactacaggaactgggcgagatgagagatctaatcgggacagatgccctaggctgggtttcagacgaggatgagtttgaacggtgcaggggtatcatccagagcatcaaagacggtttgatggaacattcaagcactgagatggagaaaattgcggtcctttcccattttcctttcgatgaccacgaagaaaatgcgtgataacttcagatctcgatcttggtagataatatttattcatatatagcttacggacatctgaagatagcttgtcccgaatttgagcaacagatgatcttccacggcgattcgctcgtagttctcgagaccttgttctctactaatcgggaccccaatacctttgatggctacctctttgtggatcccacgactggggcctgcaatataagcagcacggtcacacccaccgaaaagtggctgccatttgccatcggagcctcgacatgccctggacgtcttgctgaaacaagaattacccaggtcatgttcgccaagatcctatacggcttcgacgcaaacttggagggcgtcgatgcgcaattatttctacattacgacgggacttgtggggctacagtgatctttgcttgaatagaggtatcgacaaaaaaatcgattaactattgtttctgctactcaggcattatttaatatgtggattgggagtgacggtgcgtaagtcaaggcgcagtggccggtggggcgagagtgaaatcaagggggcagctttgagtgcgaagtagatcggacggagagagcgaagaaaaggaaaagaggtgggagaggcaaggtcggctcttttatgttggagcaaagttgagaggtcatgtacgtgacagtatggcagtcgatagtggcaaaactaaccggatagtgttattcgtgaattacaggtccgtcgtttacaagactcacattatagccgaaaacagtgtcgccaatagcaaaaagtgagattaaaactgtgtttcagtgccagagcggcttagcgactctgcagggagaccattgccgctcttcgaaactgtgaaacctggtaaggtttaactgttgcccaacgcactacgggcgctggacccagcgtgacggtcttgtttttggcgatccgtttgactgatattcgacaaagactaataactactgccaactcaaacaggggaatagcggtccaccgtttgcctgcgccgaggtggaccgtatcgcggtcttgacacaccttcttcggtgcctttgctcttgccacccgcggcttgaactgcctcgcaaggtgcgcctctatatgaagattcgctcctcacgttggaactccgccgagaatgcccagaatttccagccttgtggcccttgaggcgtgtgcaatagcgcacctggagggagccttccgaccttccaggaaaatactctgcgattcgcttccatggcaggctccgctcttccttcaattcaatcaaaagctggtcatccttagacaggaatcgggttggccctgtcgttttcccagcgcgggaccccttctgggaggtttgcttggaatgctggctgccaattttgtttttatattgtgatgtagctctgcctgatctctgagagcaggaatgctctgcctgctcttcaaaggtaactgaatagatgacccttgacaaaagtatctgtcgcgtaaggaaacctcggataggaatcgtttcgatatcgtgcaagcttgttagggaagtatgatctgcggccactttggattgaactgcctcgtcgaccgagaggcgtttagtgttctgccggggaggtctagtattgagctgcatggtaggttgtcttgctctttttagccgacgggaaggaacgctgcttccatgtgcatcttcaccactttcgcccacgtagtccgcatcgtcggggccatcaggatcgtcgctgctgtcatcggatatatactcatcccggtcccgctttctgttcggagaggccattcgtgttattgaggcagagtccttcattgttcgctcttggggacggaagttggagatgacgacggacggctggtctaacactggggcatgatctaacactggacagaatcctgtaccttccactgttgggctgcatggcgactgcttcccactgtcttgaaatgcgggtgaggttgaacgcgccaatgttccattttgacgaggttttggagacgctgacaggctctccgcatcacgacgctgtagctcgccttcgttgtcatgagctgcagccctgtctttctcctggccaataaccacatggctttcggaaacgggctgtctgttgtacttctcggctggcatgcttttcccgatgacgcaagctgccagtttcgatcctgattcgtctgcttcaattccagcatctccagacagcaaatgcgttggagtggattgattttcttggcccgcagggtcaataatttggccattgaccattgtattgccgtctgctatatctattgtcgggttcgaaggtcgcaaaatgtctccttccatcgtggattcgtctgcattctaccacgtgagccagaggacagggcaacctagctgactgagagcactgacctgcattttcatatgcttctgcttggcttagaatttcttcctccgccatggggatgcagaggccatcacggaccgatgtagagtatagaggagtggattgctcaagacctcccccctggataatatcttgagaagaagatgtcacgttgttctcatggtgcccgtcaccttggaagtctgggtctcaaagtgcgaagtcagccctctattgtcgaccactttggcattaaggaaaaagagataggcacaatgaattcaacagagtgaattgaagaaattaaggggactcaaaatgacggccaccacgtaccatcgtgacgctgatcgtataaaccttgccctaaaccactgctggaaacatcatccggcaattctcgactcgccgtgtgtatatttgatacagcaacgtttgcatctcttcccgaagaggcattcaagaaatccatgtcaaactcattcgagcagtcaatggtcacttcttccgcaagctcgttgggggctaataacgtctcgtcttcactagatgcatggaaatgactttggaagtacggcgcatgccccgagaatggaacactcgaacgccagtgctggctgggtagaaacggataggctggcgggggtctatccgaaggtatctgtgaattgatacgatcgtgggacccgggtgcccggagcggattgatcggtgccatgccgcgagaaagattcagacgcaatgtatgagaatagaagagaaggaaccataaacagatagccagcctccttctcggtcccagtgaggagttccaacaaccctttatacttgcctaccgtcccctgcctcttccgagcgctttgggcaggtcgaatggacaagagtcatgagacaaagcgcagcctgccgatacgaggacccaccaacccatccgcaatggaattcacaaaggagtcacgcgcaaggccgacactgcatgcggcatttctcccattggatcaaagcgtttcatgctcggataagttcacggtctgccctactgcgcctcgccagaagaggatcatggcgaagggatcgtctccgaagggctgcttgcgtgggcatcagcgtccagtcgggtgagacatcatgcgcacggcggtgccgaccctctcaggaacttccgatagtccaggggcctcgatcccctttgctgtgcctcgccggaacagtacaattgcggcaagatcgtccacggaagatcacttggcgcagacactggcgcccagtcaaatgataatccatcatctgtaaagtaacgctggcatgttcaaggccaccaaaagtcgaagccctcacgaaaagaatcggggaatgagacattcttcgtcataggctctagacggtggataggtggggcgtaagagcagcaaatgccaatggatgcatatgtgtggcgagaactcgtgatcagcactagatcagagagcgccacgtcacaatcgtgctcgactgaccagccggtcgatcgaatctcctcgcaagtcaaggttcccttcccgggccagtcgtagatggctacgacgctacagcgggcaaaacaaacacataccagtgaaacagggaccagagggtaggcatgttggctgccgcccaagtgaggtcacagggttgcagtgcagtggtacaatctgagcatcagggcgaccaggagaccgatgaatggatccatctacagccagtcgagtggagaaagggcgcgcaggcgattacgaggaactcagctgaaacatggaggcgcaggggggagtatgccgtgcgatccggaattacggtatcatttcaccgctgggtatgacgggagagagaagagtgcagtcagtcaaagagcggaggacggtggagcgacgcactggaagttatatagtccaaaaggtgaagctggcaggcggtcggagatggcagatccccgtttagggatagccggggccgccaaactgcttcgggaactgctaaaccaaatcagagtccactaaaccagaacaggagcgggttgtgcctttgccatttcaggaaaagcgtagacgccaaaccaaagtgggatagaccaaacccaaacgggggcagtggaggcagacgccaaacccgatccaggggggcgccgaatccggccgcgtcggcacatatggtatttgtaccttatagactcctagggtttagggtagagtagtatcttacctataagggcttccttagcctccttttatatcataagtatatatagggagctattagtatcttctatacctaatcctatagctagataggtaacttcttatagttcctctactctttagtagatagcttctttaagcttatatataaaccttacctagtgctatttattatatatagaggtttatatatagtctagcctcctacttagtatatcggctaggtttgtagagctagttctaaatataatagtgaagttaaaacttactatatacttagcctatcttacttatctgtaaggtagctccttcgttattataaagttcgttaagtttatataatctatcttaactaagacctagtatatatttcctttaaggaaatgtctctattcttagaaagcttctataattactagtatctcttggtttcctactctatagtaggtttcttccagccttatcttatataagaagaatataattggtttctaaataccgctctctttttatagctataagtagattactctaattacttcgcctaatatattagattctactaaggttcttagtagggggtcgaagtatataaggagaggggctttttaaaaaatctccttaatctcttagaaagccttctttatagctttattaaagtagaagcctagcttctttttattcttccctttcttctatatatctaggccctagactaatatattgagcggccctataatctttaagtataatttaataaacctatagtaaaagtttgcgaaacctataaattactatatatcgaagatatactctagttccggctaagtagtaatcgcttctacttagataaggtctatagagatactattgctaaagataataaatctaaggaactctacctaagaagtatagaaggtatacttcgaggcctttatatagagtttaaactagtagagccgttctaatactatttatatatattctacgtaggattccttatcctaagagaagattaggatattatctaggtagactactaagaagatatctagtaatcctataagagccttatttatataagcttagaaggttataggtatatttgtaagcctaaacggtattatataatactcgaaatatctatagtaggttctaaataccgttttttatttattacccttcttaatatagatcctatagtatatatctctaaggtctagcttagtatagacctttatactagtgagtctcgatagggattcgctaattaaaggtagggggtagcggttcttaatagtaattatatttaatctatagaagtctatatatagccgaagtttactatctttctttagtataaaaagaataggtacccctatagggctctttgaatattagatctagcccctcttaaggttcttgttaatataggtatatatagacatcggcaaagcccagcatgggcccaagatttcggcccacggcccaacccatatgggctatgggcctagctcccctaggcctagcccagcccatagcccagtaggctaagcccataagcccactagtagcccatttaggcctatttttatataaataataggtcttagtgtatataaaaatgcttacttagtagaatagtatactattacttacatgtgttttagtttcttaattgaaagacagccttttatgtcctagtagccttgaaattttagtttttatttatgaaataatttttaatatggccggtcacttattatttctagaaagaataaaaaaataaggccggtttagtgatactttatagataggctggtctctatatagaaatatatattatagtatagctagtaatgtaggtatactaggtatattatagtgaattataatacctatgcgaccgaatcctttgacctaaatactgattctagaaagaataaaaaaataaggctggtttagtaatactttatagataggctagtctctatatagaaatatatattatagtatagctagtaatataggtatactaggtatattatagtgaattataatacctatataaccgaatcctttaacctaaatactaattaaagactattaggagaattaagagatatctaatcctataatataatttaaaaatagtacctaaaagaagaggggggccttataaggctaagaaggtatcttaatcctattaagtatataccttttaaaattaaacttcttttatttttttctattcttaatagtatatattttagatttagagtatattctttactctataaagctacctactaattttaaagggctaatatatatttctttatatatcctattctatagttagctatagtatatagtctaatctatatactaaatatagttattttaggataaaagggtatataggcgctgctatagagaatataaattatatttaaaattctttaggctacagcctacttataatcaattctagaaaatataaactaatacagagactagtatataggctaatacagagactagtatataggctaatatagagactagtatatagactctattatcgatagaggaggtactctatatactacggcagagggagggggctgaggcctataggctagtagttaaggttcttaagagcctggttaagaggaaagagttaactaagtattagatttatatatttctagattatatcactgagtaggagctatagaaaggataggaagactacgctaatttttaataacagtagattagtgtaattaaggttcagcagtatattcaaaagaattaggagtatatcgataaagtacactaaaaggcgactgcgctatagggtatacgagacactaaggccttctttagatacattatattaaagtcaacagctaagctagctagcaaattgatcacagtaaaaatgaactaccaggatataaggcttactattaataacgaggttacctaacgcgtttcttcctctaggagtagggtccagaagaattgtaagtatattaagctgatcgatatatagtaggcctattctaggctatacagtaagtcgataatcctactctgtataaaggatctccgagattatggtctttagcttaatactaataggttctgttatacagctaggagtagaagggatcttaaagaggttagcgatatatcgatcggtaggggtagtagctagtagccagttctactactaccgctaagtaccctaagattcgatataagtaaggcttaataaagagaaggagggggtaggtaggataggcccctagctattctactaagtaataatactatagctatcctactaagtaataatactgtggcagtagtaacgataagccagcctactaataggacatatagctaccgcgtagcagagataataatagataagtatacaataattgcgaaagatagtatatagaaagagagggaggccctagttacctttataaaaattgtgaaactagtcgaaagaaggttcggtaccagttacatctatttcaaatacactaaagggattatcgatatactaggtatacgaagcggtggtaagagcccttaggagctagtagagcgaatctaactcagttactacaatcttagtcaataggataagtttcggaagaagttctctatctagtttatactaggcgcagatcccagaaacctaaaggaaatacatagtgtctactaattcaatccgaaacccatacccccggtagtcgtatcatttaatactatatactagcttttatttaagagtatttatagaagggttatacctagataccaatttcagcctaatattatctatacctaaataactatagatagcagtatagtactactatagctacttaggtagctaaaagaggactttaatagtgcctaccctagtggaattctatcactaatctactaagaattcgatatatataagcactatttcagtgagcgttatgggcgccgccttagctagctacggagtatatagtatagcctagtatagtaactaatctaataagacctagtgtactatacctattatatattctttcggctggactactaatagaaattaattgtatttctatactatataaagagtacgctacctagtaagagaatatcattctaatatattgatattaatattagggagtttatcgctactagtaagggcagtaatatcctatagggattagtctcccttaataacgaagataacggtaattatactattattctactaggaatataatactacattgcttcttagtagaacaatctacaaacctatatagaggacccagaaaacctatctagccgaaagccatttaaggtccctaatagctttatctataggattaccctaaagatatggtaactagaggatgtggcttagtaccgaataaactggaaaaagtaagtctataaggtaggtaacgtctacctatcccttcctacccttccttacagcttaataggactagtaactagatagaggaagactgtcttactatagtttataggtattagggataattacttaatactcgatatacctaagtctgggtcctaggaggaggtattagctgtatatagagaccttcttaacgctactaggataccctctagactaataagtcggtaatatatatatatcctatatacctttcccgctactacctacttctatactacctctactattttagaatgcctagtagggcggtctaagtagataatactagctgctataaaggaccttaatatactctttaggcctaataaggccgctgcagtaatatatatttagaattagaggcgagaggcatagctagagtacactcgcctatttaagttgaccgttaaggctgaaaaggatgcctataggaaggacttattcttttagagacataagaggcgccttcttaatagtagtgataccagcagtggtaatactaatagtagtaatactaatagtagtaatactactaatagcggtaatactactgatagcggtaatactgctaatagcggtaatactaatagtggtgatactgatggcggtgatactgatagtagtaatagtgatagtagcgataattggcctaacgacaacgtcggcgtcgatattaagataggcgaaggggagggggagggcagtaaggctgatagagaatttaaggaggttaataattgaggctgtattagcaaatttcaatgggtactagatatatcttttttttatagataaatacaactataataatttcttttataataatacttctaccttgccgctactactcccagtttnnnnnnnnnnnnnnnnnnnnnnnnnnnnnnnnnnnnnnnnnnnnnnnnnnnnnnnnnnnnnnnnnnnnnnnnnnnnnnnnnnnnnnnnnnnnnnnnnnnnnnnnnnnnnnnnnnnnnnnnnnnnnnnnnnnnnnnnnnnnnnnnnnnnnnnnnnnnnnnnnnnnnnnnnnnnnnnnnnnnnnnnnnnnnnnnnnnnnnnnnnnnnnnnnnnnnnnnnnnnnnnnnnnnnnnnnnnnnnnnnnnnnnnnnnnnnnnnnnnnnnnnnnnnnnnnnnnnnnnnnnnnnnnnnnnnnnnnnnnnnnnnnnnnnnnnnnnnnnnnnnnnnnnnnnnnnnnnnnnnnnnnnnnnnnnnnnnnnnnnnnnnnnnnnnnnnnnnnnnnnnnnnnnnnnnnnnnnnnnnnnnnnnnnnnnnnnnnnnnnnnnnnnnnnnnnnnnnnnnnnnnnnnnnnnnnnnnnnnnnnnnnnnnnnnnnnnnnnnnnnnnnnnnnnnnnnnnnnnnnnnnnnnnnnnnnnnnnnnnnnnnnnnnnnnnnnnnnnnnnnnnnnnnnnnnnnnnnnnnnnnnnnnnnnnnnnnnnnnnnnnnnnnnnnnnnnnnnnnnnnnnnnnnnnnnnnnnnnnnnnnnnnnnnnnnnnnnnnnnnnnnnnnnnnnnnnnnnnnnnnnnnnnnnnnnnnnnnnnnnnnnnnnnnnnnnnnnnnnnnnnnnnnnnnnnnnnnnnnnnnnnnnnnnnnnnnnnnnnnnnnnnnnnnnnnnnnnnnnnnnnnnnnnnnnnnnnnnnnnnnnnnnnnnnnnnnnnnnnnnnnnnnnnnnnnnnnnnnnnnnnnnnnnnnnnnnnnnnnnnnnnnnnnnnnnnnnnnnnnnnnnnnnnnnnnnnnnnnnnnnnnnnnnnnnnnnaaatttattttttgtttttcggggaaaaaacctcttagcctaaaaagtagtttactttcatacttctgcttcgctactactacttaaagtttttcgcccaaaaaactagttactggttttttaggcgaaaaactcttaacctaaaaagtagtatatatattcttatgatttctattaggcccctagctagtaagacccgcgtagataagtttttttcttagatcgtgggtccctcagcctttttaggattcttagcctatattatgtagcctacgcgtctctatctaaattaggctaagtaaccagctaatagggtaactagttaatcttcaatcttccttatctagttacaatagaattagtcttttattatatatacctatccttcctatttatatatactctatatcgccccccttactgctctatccccttataccgcccccctactttctaccgccatactaggtaccatgtcccaaagtacctaatctaataggaatatagatataacctatagtataggctatatcccctcctctctctagacctcttaggcagagtcctcttatgccctgtcctcctttagcctactacctagtagataagctaggccctttaacactgagcccaatcgccctataatccctagagaccccctatcctgctttacccacgttagccctaaccagagaaaggactacgtcctatatgataaaatagcaaataagatataggttgaatagtagctataaatagactatagatagaaaggtagtatccgctaggatataaatcacagctcccctatatagtaagacttctactaggttacctatagcagagataggataccgaaggtttagtgcaagttctgccacagtattttagaatacccgaactttctgagtaatagaaagggctataacggcttattaactatattaaggtacctaaagacataggcctaccttagggcccaaaacacaataagagtaggaagaggaattagccaattttttctaaaagaagtatatttttaactatctaatccttagctattactaatatatctgggtcgataggaccgtataccccctaaggcctaatattcagaggctgcctaggataaggccctactctgatttattactatagatcgactacccttctcccttattaagagtaagtcctttcggtatctcttctaaatggcctacgtagcactatccctcccctagataccttctactataataatatattagcgcctatgcgattatatttaagagagcgtaagcttagtacttaggacactacctaaggatacaaaaatcttaattatattagactgctagacgtccctatataactagggatttatagtaattaccggctactttatcaatagtagctaggtatatcgcaaggttctacttaggtttaagccactttaccaggtatatactagaaagtatcttagtactatccttcttaaaaccctggctaagtataagattatagaccaggtattcagaatcacaactaataatacttctaataatataatactagttaaagctacctagatagggctcctaagcggtatataggtattccgaataccctaccttacctatattatctagctctctcttaactagctcctagattgcctataggctatactaaaaaataatattattaagttagtttagactgataagaattcaaagaatataaaagaaaatggtaattatcagaaataagcaatctcgaagatactaaaaaagatctataatcttaccctctatatctatattagcctaaagcactaggctaccttcctctaactataagaagggaaggggccgcatattattctaatctaggatatagtaacccggtggaactcaacctttttaatactttactagataaagagaatatacctattctttatatccttctgtactaattataattataaggagatacttcctagtgatttagaatggtattaaattgactaccttctacaaatcacccggcctttctatgactatataacagaactcttaaagataaaggaagtgactacctaccttacctttaagatttataatgccctctttaattacttcgactaggtagaggtactactaaaatggaagtgtgctctgtagaagttagaaatgctaagtatacttattactagctacgaaaagctgagtgagtactatatataaacgaccggttgtaaaggagacctctttactattaggataatactggcccctgatagttaactttaattcttctggttggatggctactaggagcctaagtagtatgataaatatcggaaatccttcctagatatattagcgccttatcgagaacgccttactttaggctaggggtcagctaatatactagctataataccagctagctctaggctacgtaagttactaaagagtaggtagaagtctataagaccagctgttaataaggtaacctagtaccttaatagtagtatactataccttagtctcccctactattttactatactatactaactactctctacctttagaccttattaatactaagcctctgcagttctagtaagagaataaaactcgttttcctataattgtataacttacccgcgatatcctcttaatactagtaactagggctagtattaagcgactctttaatactgtataggatatttactattatcgctgcggttgcctaaagtctgagacaattaaggagcttatactataccgctatataactaagttcagtattaaggatactaagataaaggaattgtagcagttacttagtctagtagaggctgaggttaagaataaggagagtactgactttctagaggatagtaagtgtaatctaattagtgataataaggaggaggagggaggggaaggcgatagggcgtaggaggcatctccttcctccttaaccagtagggataggggcagtaatagcgatagtgagatagagggggtttagctagatttgccagagcctactactctatttcgtgtatcttagaggaagcgtaagagtagggtcgacgatgattatatatattattagaatatattaatggtactgtcttcttaatttttactcccttctttgaattttcctggtattccggctgtaactaggatacataataatacgggtcggaaatatattagttatgtatccatgcgctagaggcctatttgtattatataaggcctatatgggcccctattatgggctataggcctaggatatcagcctataatttagtgtaggccgaagaagtcagcctaaagcccagcctattggtaggctgggctgggctgggctatgggccgggtaggctttgccgatgtctaggtatataggacttctaactctatgttcgatagtaagtatagtgacctaaacgggggtacctttcctagctctaggtcgatagtataattgtatataatatattctagtaggattgaagctagagccttattaaagatatctacaaagtctctatatacttgcggtaaagggttgtctatctatatagctcctaaccgttcgccttcttctaatagatctagtggtctaatataaagtatataaaagatactatatagatacagttctttcttaaactcttctggggagactatctctatttctagcggggtacccttatagtataactaacggctagcgctctagtcgatatctagatttactatatagagctagtctatccctaggactatattatatcccgatatatcgatagccttatagtatatctttataatactatatcttctagtactatctataagctagagagcaatctcttagctactatataagtagattttatgcctatcaattgcctttactagatagggtatcccttttatatcttctagattctccttcgcctatctttagctaataaaggtctaggtagccttactattaattagaattctagtaacccctatcggggcgcccttataaatatctaagataaatatattatatactaatatactttagcccttctgctaaccctccttaagggttattcctagtaccgctatagcctatagtatagggttatctatttttttagctcctttaagttattcttctagaactacttagcttttaggtaaaccctcgcgatatatctagcttccttatataagtaatataagtcccttacctagttatctaattttaccccctagcctcgcttcctcttattagaggataatgactagccttatttcctcttattagaggataataactactccttttagctatcctataaggtagatagttcctagccttagtctaataacttcttactattatcctttaagtctatattcctattctacctatataggtatcgcttaacctatagctttatagtatataaaggtatttagctctctataaagctaagataggctacctaattattatagatctttattttaggtaggtcctactattaggcttcggtttagatctctcttaaaatacctatctctaggcagtcgatatatacctaatctaatagtatagagtgtaagtggttatagatccctattaggtattaggtatattaatatatactctattccagcttctatatagcttactattaatcggcttttactttatactataactatactaggtctataacttaggttaaggcctaagtttcgaatatatcctatataatctactttataggattattctttcggtattatatctaaccctaggtaaccttattcgagaggaattccgttacctgtataacccttactttatctaaggcgaactatcgtaggtatctcgcctaaaatacttcttattttaccttaaatatatcctacttatctatagttttactatagaatactggtatattagataggcttcgcggctccctaacttaggagattttactgctttatactatacctacattattatcgcggtcccctactaccgttaggggaggttagggtatcgccggtatccttaatatagggtttaggggttctggtacctaggcaatatctcccttaagtagtggtaggcgtagtatactcgattcctcctctaaggtaatggccgcgaggttccggtcgcgaaggtatagtaagagttcggctttctagtcagtaattataagccgttttttaagggccttaaggtctcgctattcggctataagccttctttcgttttctccgatatcctcgtcggaggattctatcggttaggcggccccctcttctacaggagcggctctttcagtaggtatggcccctatctcagtaggggtttgtaaatcctgcgtttagttttcttggccggtaggtaggggtatgtctccctgtaatacccggcttctactataggtatttcgaggtatcttataggttccagcggtccaattcgtgaaataaagcgattagaatattaggactagctaccagcgtatcctgaaaatagaggttcgaattagagtggaggtccccagcgtgggtcatataattcagtagactaatcgctaaggttctaaatctcatgtgcgcggtgtgtgtatacccctggcgcttacttagcaagtacgtcggcctatacgggccagttgtgcaagtgaccctcggggtcgtaacatttaccttgtgaggccatcatggttcgggcaggtgcgattatggcaagaaagaccttgatgtctgcggtcatgttgagtgcagggaactgcgaacccgcgatgtatctgaagttggataaacagagacacctttttttctagatatatttctacatgtttatatctcaagattcgccaatttggcccagaactaaaatgtatgactcaagtgaaataaatggtcagatttctgttcatcaaaacccagaccatctgatctgcaccgcagagactccaattctgcattgctcgaggccaatttggcatatcatgcagcatatagcacagatgagagcctgcctattcaaagacacaagcaaatcgaaaggaccatatccggagcaattcatgttctttgggagtctcccctgacagcttccattcgcgccaatatgccacacaatgatataccgggctttgacagaactgatagttgctgcgaagacaggcggtctcgagatgtttgataccctacatgctgctggagcagatgagtctaatggtgcagaaatcatcgttgggtgatgagcaggtccaaattcaatgagcggactactcagtatccgctctctctacctctttgcctgttcatggagccatcgaggctggcaatcaacctatgatacagtatccccgaactatcctcctcacacggctacaacctttagtcgcctaccgctatcgtatgccatcgcccgttacgattcaaccaatgctagcgtgtaacggtatctagtagatttaccatcttaccgtcagcttaaccctaatctgcgcacgccatcttctatatatacatcataatctagatcttctttcctggctggtaactttcatcccggtagggttggtggtgcaggaacaacggctctaggatataaactaccttgcgttgcttcgctgcctctcactggcaatcaaattgtagcttacgatccagttattgcaaatagtatatactacccttgaatctagatggcttccccgtggaatgccaagtccgctaaatatacaaaactagagggtaagggcctaagaaaactgtagtcactgacggaatcccagcaacagacgcaaaatgcgactatttggcttttattgcaatggtgagtaatgataccagagcaaatgatatagacggtaatactgctttgaattatggctaggactggtaacgtcagtgagtattgggatggctcgacaaatagattgagcgaggaagcctggcagaatgcgacaaactgctatgggtagtatagaaaagccaggtttcacagcaaatcaggtgagctttatatcctaggcagtagcacccaattaggaaatactctccgcgataagtccttatcgctttccaaggttctccttaggcactaaactacaaacagaaatgacgtttctgccactcccggccgcccggggaaacgagaatctcaggtgtcaagtccagattgagagcgtcatccactcaatctactttattccgcgagtccctatatgatttgaccctcccagaaacccctcaattcaaatcctagacattgaaaaacacccccattccaatatccctccagcctcgagctccgggacgcaatggcacccccgcgccagcgcaccacagctatcgtggatgactcgaggtccgaagcctcgagtggtacgagagaataccgcaaagccaccaagtcccgcagaccagctgcggcaaaagagaaagcctcggtcaccagcgcgcccgtcgtggaacaccagaacaccgaagaacagccccgagtatgtttcattctgaaagcaacgatcaatcgcaactctacacaaagcacagcgaagagaccataacctaatcccccttttacctctacagctcccctggacagatctacctctcgaaatgctccactcctaccgccacgtccataaactccccacaccctccgccttttcgagcgactactcccgcatgatcctctcgcaaggcgtcggccttcgctcgccaaccaccctcgctgcccgccgcgctcaatccttatcccaaaaccactcccaccgaaccaacacctcgtcggactccgtctccgactccacactgcgtcgcaccgccggccaggaccgcgtgagcaaagaccagttcgcgcttgttgtccggaagcacttcaacagcgctggtctctcggagcaggaaacaattgcgcggtttctctacactgtgcgtgaggacaggagagggaggcagttccgattgcggtttcagccgtaaggtgaggagtctagctttggtctcttgctcttctcgtttctttcccctttctcgcaggggaaatgggattatacagggctttggacagagctagggctcttctgcttcttatcccaccgttctggtgctagcctgtcctggttgatggtgcgcttggttcggtgcggtgaacatacatggcgtgtgtggcttattgggctgccttgctttgagaatctggcggccttttctcttttgatatattaagatacccattggcgttccgtgtgtttatcttgttctatctctacttcttggtttgcgggttgcggactattccttccactatgtaactatactttacttgacttatacttttgcctataggaattctacgtcattaaatcggcgcagaaaatactactcgaggaagagtagcgacagcttcaagcgttaaatgacttactagtaagcgatagcgagatccttccacagctctgcaataaacaagtatcagtaatatgggaccgcaaacgagcagtttagcctctttgtaacggtgttgtttcagccttggaagcgagcgatctttaagcctactctatcgataagcctgagccttgattgagtctccagatggtatgagtaggaataatgatatttgatcttctgctagctatttgcgctatctcctaaggattagctagcgttagagaaggcctatactgctggtgagcattcgttgaatttggtgacgggggccaacggtgcacggctgttgacacatccaacgtattcgataacttcgcatatgactatgtattcccctagttagtctgattcgtacatctacttcgatatcgatctgtgaggggttcgtcatataaacataggcagatggatttccttatagtttgggagccccctcgagactggcaagaattagtcttagcatatcatcaatacattgtgttccttccacaaagtcctctgtatcttacccggttgacaggccttacacctgcataacgtatacctttacaatagagtgctataaagaagatatagctagttacttcgagggatagttcgcttactaagagagacctaaaaacgatataactaactaaagggattttcgtaattgagacagaggcacttgtccgatatctatactatcaatattttagcttaatgtcatgaaatctttattccttcgcgatagctccgccaaggcgtagtatgctttatttaggtcggcttataaggccatatattaccgatagctatagaactactagataagactaggagtcttattgaaggcttctagagttataggggaggttgcattataggagcgccagagtccgcctacgccacagaaggtaggtaagcctgacgctgctaagattccagctctaagcagagtaacgatacgtttgcagcctcctaaatattccgtaaatgattgaaggtcagcggccggtataatgctcttttcggataaagccatggtcttcaagtcataatatggacgttgaagagctgagcttatcaagggcgaagatgaaagtagggatacggggaatttataacttactgaatgaggcctgatctgtaagacatcgaaaatatgtcggctcaaccgtttctgtacaacataggtccaatcaatggagtactggctcagctagcaatttatagagcctgattacatgaattaaaataaacaatagttacacattattaggattaatagatcctccggtatgctgtgcattttacagtcgcgaaaccgtattaaatggtcggtgtattgaaaatggagtgccaagattgacctataccaattaggttagactgctgtgccaacggtcattgcagtcattacccagtcattacccatcgactcgactataccgttgcccgcaaaatggcatctgctcgcagcctcgatcagccgccgtccaccgcgactgaatgtccagcgaatgctacatcgacactatcaccctgcccgtctgcatctaccccgcccaccgagatatcgaccccgcgtgacgaaatgcccgaagttaacgacgatatcttgggaggactggaagacgtggtcgttctagattttaaggggcctcagtccctaaagaaacaaatcgactcccgacagaaggaactgcaggctagtcgctcctgccagcagttcatcgtgtgccggaacgttaggaaggagcaattgactagcatggatcagcgacgaagcctcggtagaggcattcgaaagtcctataattcaaacttacaaattctcgtgctcaagatgctgactacaattcacgaagccgctcacttgaccctatggcagattatttggaggcagcttatcgcgatgggggatggagagttgatagcaccatgcgggggggggaccttcctaagccaaagcaaaatatcgtctaaggaagccgatacagcgtataaaccagtgaagcgaaaccaggggtctgactggcctactatcgtcctcgagtgtggatactccgagtcgatgcgtcgcctcgcagtcgacgcacggtggtggctggtcaacgccggcggcgacgtgaagacagtcctcctcatctcaataaatggggagagacaggccctccacctcgaaagatggtgccttgctccgccttacgaccggcccgtaacccgcaacaccccgagtatggtcccgacgaagacgggcgaggtagatattgttgcaggtaatcccaggccatactcacgtactatatctgtagtaccgtactaatcattgcaatcataggtattgtgacaggggcgccgctatgcctgaagtttgaggaccttgtggagcggccacccggcccaacggagagggacgttgtcctaactgctgatcagttggccacatgggccaacttcctgtggaccacttatcagtaactaccatctcggtcggctgagcagcagtcaggctagtactaccctagcgtcttatgcctctctcctcgaatctctcgcgcaaaggggtcccagacgttgccaaccagacacgacctagtttcggtctttcttgaagcagttccttgaatttgtaacggtacccagaagctccaatcatttcactaggcgctgaagccattctattaatagtacagcggaacatgttatcttgtattctcagaagtcttgacattaagtctagcagaattgagaggatgttatacttaacaaacataaactaatacgatacgtatagcacctaggagagaaagcaagaaacgatgaatctcaatgataaagcagagcactgtctctgctatatagttcattggtattagcttaatacagacaagaaataaggccccggtactatgtgttttacatttgggcgacagacgttcgttgtttaatttaccatctttacttcaattcaatttctatctcctttatagaagtcttagggcggacgcgccgtgttctccaatttattcgcgcgtataataattgaatttacacacgcttctaccattttagtattatctagcagggtgatctagctaactattgcttcttcttgctcagcatttaatactgaattatgaaggtggcgcgtcgaacgagaaggccgcccatttaaccgggcgataggagatggtaaggaataccaaattcacgcgccaatggcgcgatttttagtttttctctaggattccaggcagtaatagcatttgctaaaagtagcctccaaatctttcaaggttatacgaagaagtcgaatgaactttagggacaatgggtgaagtgagtactccatattttgaggctatgttcctaggtgaagatatatatcggatctgctgatcggccacatacttgctagtatatatttcatttaccatttacataagagcatgcatgtcctctccagtaagcaaagaaggcagaaaagacagggatacaaaccgaaggtgagagcaggacaagcccccgaaatgaaacaattcagacaacatagtaaaaacccatgaaacagcaaagaatcaaccgagggcgacctcaaacaacagtgtaaaagttcataaacgccgagatatatataccaccctgctcgacatgttccatgtagccagtattagcaatctcaatacaggaaagtcaagttatttccaggcgttgagaccagcccacggatcggcggaggagccgggctgcgactgtggctgcgactgcgaaggggtcttgtggtgcccgtacggtctgctctgcgcatagccaccaggaccagaggcgtatgtaggacctgctgtaggaggataggttgtctgctggggacgcggaggaggcggaggcgggatatagccctgggcagccatatagtgcgagggctgagggccagcgccaggagccggcgtgccggagtttgagtagctgccgtacgggaccggggtttgagagaaaaattgccgattcgggggtggggacacgggggtctggtaaggatatgccatggggttgtagccatcggataggggagctgcggcaccttgctggaaatgctgggccgggtaagctcctggaccacctcccatgtactgcccgtagggcgctggagagtgggacacgcctggcaaggtcggagggtagcgaggtgacggctttggggatggaccggtggttccatacgccggtgtttgaaccgccgggggtggtgacttgacttttgagggcggttttgttgaccccgcggagggaggttccgttgataggcgctccatcagctggcggagcttctctcgctcgcggtcttcttgctctgagacaccgctggactgatcgcggttgttgaacgagtcgggattcctgcggagaccgtctgcactgttgcccacacccttttcgcgctcaatctgactgaggagctgcgcaccttctgaccggcggttgttgatgaaagtttcgacattcttgcggagactgtcgacattttcacacatttccttgtaaaaagtccgtgcttgcttgatacccgacgagagcccatggaaggcttcgtagaccttcttgtatcgagctagcacggaattgcgctgtcttgttatagactcccacttcaacttctcggattgaactcttttgtctcgacgaaggtcatcgtatagcttgttgagttcttttatcaaagatgattgtttgtgattcgcctgtacaagtatgttctgatatggcaggaactttggcaattgttttttgaagcattcggtttcttggccgacaatcgacttcaggtttagaatcaagaattccgtgatgtcatctgcgtggatctaaagacagagttagagatttttcgtgaacagacacgctaggatgcttaccgccgctttgagatctgtgagcagttgagacctctctcggtccacgagattgagtttctttagaatcacctccactttagcaatctgctctgcaacagaggcacgaccctcatcatacacatcatctagcagagtaccttccgccggactagtggcaccgtccttgcccttgctatgcttcgaacggactttgatcaatgctcgctggaagaggacatcggcctcatccgtttcgccagcagaccgcatctcatcaaaatcgctgtcatactgccgaaatgtggaagacaactgagaatcacttgcgctggcctcgttgatagtatctcgataagatcggacatcccctcgaagcgtggtattgagtcgagagctgggttgctggccccaatctgctccatactttgatcgcatcttctcacacacgctctcttctagatctagctgctttgagcactcatctaattgcgatagcacttctagcttgcgctcctgcaactcgtcgaatgccctgcggaagggactgtgaccagcaagttctgaacaccagcgacggaactcactgtccactgacatgtcctggttcatgccacccttcaagacatcgagagagcctggcaggtcgagggagagcaagctagcggccagctcactcctggcagtctcggccttttcagtctcagctcgaagcaacttgtccttttcttcggagtaaatactggcgatctgagttaccttctcaggcactagttttttgaagatgtctggcccagtgatttccgtaatatcttgtccttggtataattcgctaaccggtatcgccttggcagctgcaacccttgcaactggtgaaagaccagcctcattagggaccggttggtgatagatgaaatcattgtctttgaccatagtggcaagtaaagcttgcacatttgtttgattatgcttgacgaggtccacgaggttcggacccgcctctgccgtcagactggaggtcgctggaggcgacgaggggaatgtctttgcccagcttagagcagtggcggactgcttatcggccatctgtaaacgagcaatagcaattccataagatccgctctcactgtccgcaaccgcctgataatatgatgctactgatcccatatgtgctgccttggtctgcacaacaaccgtccagaccttgtcaaacacattcttttccacgaaattttgcattatctccgcagcctgcgagtagaggtacgctgcctgtccagccagcttggccaaaagcccaggcttcctctggtctgccacttgtttctcaaaaaacacctcttgggcttgagctagtgtgacatttatcagtgtcttgatggtgtcctctttcaggtcggttgatggcggatgtaagaagttcttattaatatatgtaaacattccggcggatgcctggaaagagtgataggcggtcttgagaccggtatcgtcggcccggctctggttggcagcatggcaacataggatggcggagatgttaaagataatggatgccttttcgaaggctagggagaattgagaagtagacgcatgagtgaaagcatcgtacctatagaaaaatagtaagcaaaagcggaatatacaccggaaaaatacccctaccatgtgaaagagatcttgatgtggttgtcatcgatggggaatctgaggtccagcagctctaactgactgtagtatcgatacaacagatcacggccgatagcgctgtctttccctacgcccctcatgtcctggcgaagtcggttgagagtcgcgcattcttggttgtatcgctcgggatcctcgccattgctctgtcgaatgtaatccttgaggggctggatccaatcaatctcgttggtctgcttcaacggacatgatagcatcggcgactgagccattgtcggatggttgccaggagcgatatgctcccatccaataatacgaaaaccgggcgagagaaaaaaacgcggggcagggatggtcagaagctccgtgtctgagggggtcggagtcgaggctgtggggtaagggagacggaacggtcagcgcctgatccctagtgcgtcaatgacgtcggccaatcaggtattcttcgatgcaaacaatctagaaggtgacacaataatggcagtattttgggaaagaaaagagtcgcctagagtgttgaagtgttggaatgtcggaggagggagatgtgggatgtgatatccgtggctgtgcctcgatgggcgccaaaccccaaattagccgctcaactacaaatacatagaacgccattgaacaaaacatttgaattttgagtaatatcagataattaatagatgggaatgatcacagtacagtcagaagtagagagcttctaaggcatctatcactcgagaatagtaatacaagtattctgcccctaagacctgggcagaacaggtccccaatatcgccggcgctatgacatgggtgaggtaaatacaaacggatatagagtacatgatgatttacattttcagctcgacttcttcgagctatccttgctgctatcgtcagcatccttcttttctgtgtccttgttggagtctttagagtcagcctgggatggcttggagccatcatcatgcttctccgtgagtcgatgccatacagacttcaggaaaccttcgttcttggcggcatcttcagcactactggaggtagagaaggggctacaagtgtagtcaattagtacaaaagccaatatccacgacgaactgtgcatcttacctatccttgttgaaattcattgtccgcttcgctgtcttatcgttcatctcgtctgcaaggacctccaaaatggtgcgctgattgcccgtcaggtacttaggcatagcaaccttgaattcgaccttgagatcgccattgggagtgaaaccgcgagcacggccattaagtttcttcatgcccattcctgacaaagtgattcggtcaccggtacccgtaccggtggccaccttgaccttcacttgattgtcgagagttgggatagtcacctcgccaccaaggatagcagtggtgaggggaatggaggctgtatatagaatgtcggacccggagcggctgaagcgatggtctggagcaactcgaatggagacgtaaagatcaccgggctgggtgcgagcaccagggggaacagccgttccagttggtggggagtcaccttcaccggtcactcgcagacgcatgccgtcttcgacaccgccggggatgtctatcttgatggtcttgcgctctcggacaacgccatgtccgttgcaggagccgcactctgatccccggggaacagacatacccgaacctccacaagcgtcacaggtggcggcgacttggaagcctccctgcatgagatgaacgcgggtacctgtgccgttgcactgacgacattgggaccgtttggcaccagacttcaatccgtcacctttgcaggttccgcacttggttaacggcgtgatgacaatttcctgagacgtgcccttcgcagcatccatgaacgagatgtttgtttgcacctcaatatcttcgccaaccaaaatttgttcttggaatgggttacgcccaccccggggtccacgccgcgctcctccggtaaaggctccgaaaagatcctcaaagttgatgtcgccagaaaatccgccgccaaagccaccactggctccaccaccaaagccatggaatcctcccgcaccagagaatgggctgccgccagcgtttggattgaacccgccattctgatcgaaagcggctgagccataccggtcatagttctctcgcttctgggcgtcagataacagttcatatgctgtctgggcttcggcaaacttgtctttggcctgggcatccttattggtatccgggtggtacttcttggccaagccgtagtaggccttctttatgtcgccggcggatgctttcttatccacaccgaggaccttgtaagggtcgggaacagccgcaagaggagatgtagtgtggaaggcctgtcgatcaaaaaaaaatatgttattagcaacccgaaccctgacagtccgtagagacgacataccctagccgatatcaccaaagattcttttctcttgcaaacgccctcccggaaactcctagccggagaagcagagaccgtggcatggtaatttcttgtttgcgtagatgagtgaacgctattgccggaagtctgcttagagcactgtcgctgggtccgcagcaggcgcgccgggaaagccgcggccttgggaaatgccgtggatggattcatggatagtaatagccgaacaacggttggacagcagtggtggttgtaagaattaaaggagatggatatttgagggaaaatgattcaagaaaaagaatgacagtttgaactctagagcaccaataacgttcaaaaccaatgtaagcttctctccggatcacagaagcttcgagtccttcggcagagagaagtttctcggaaaaacgtgtcaccggatgatgatgaaagagttgcttaccgaagcaatggggacgggtgctccgactacggaattccagcttccactctccccatttgtatctaatacttattgctgtcctcttggagctgtgtcacgggctgccacggttcttcactacatcctttcttatttccttcattccattgcccggacgttcacttcatactcaaggagcatgctccgcggccagaccctcccctggagagctgtactccatcaaacgccacgacctctcctccgacggccgtttcttgcatcaccgagatataatgcaacattccgatcaacactaatttcggcccgcttcggtgcctctcttccgtcgtcttcccgcgccttctctgcaagctccattcggcgtagagagaaacccccgccagaggaccctaaagaggaatcggaagaaaaggaagaggacgaaaccagtcacgatgataagggaacggaacgggcacctgaaccgcggaagaagggagccgattcagggaagcatgtcccttccgcagatcaggtagctcccgcgcggagaaaagaccggtcatccgataaagagcgcggagtggaagaggaagtcaagaaagaagccaatgcatcagatagcaaggggaactcgaatgacacaccttcgcccatcccaccaagtgatggtccggccgactccaagcctagcggcgcaagcagcggcggtcatggcggcaacgatgatagcgggaagaagggcaagaaggcctccggggaaaaggctttacaaaagccggcagttcccgacgtctacccacaggtgatggcaattcccatcgcgaaacgcccgttgttccccggtttttacaaagcgatcactattcgcgacccaaatgtcgccgctgcgatccaggatatgatgaaacggggtcagccgtatgtcggagcgttcttgttcaaggatgacaacgcggatggtgacgtgattgagaaattggacgacgtttatgacaccggagttttcgctcaaatcaccgccgcataccctcttcgtggagagtcaagcggcgtgacagcggttctttatccccaccggcgtatcaagatctcgtcgctacttccccccggagagcataccaaggccgctacacctccacccgcacctacgtcagaagacaagacgaccgaaaagcgaggtgatgtcgtggccagcttcgaagaaggcgcacccgagccaactcccaaagaccattacgaacctacatccttcctgaaaaaataccctgtcagccttgtcaacgtggaaaacttgaccgaagagccgttcgacaagaaaaatccaattatccgcgcggtaaccagtgaaattgtcaatgtgtgcaaagagatcgccaccttgaatcctttattccgcgaccaaatctcggcattctacaccgatcaatttccaggaaatctcagcgacgaaccggcgaaattggctgatttcgctgccgctgtatctgccggtgagctccacgagatgcaagaagttcttgagacaatgaatatcgaggagcgtctccccaaggcacttgttgttctaaagaaagaattgatgaacgctcaactgcaatccaagattaccaaagatgtcgaggccaagatccagaagcgccagcgcgagtactggctgatggagcaaatgaagggcatcaagagagaacttggtatcgagtccgacgggaaagacaagcttgtcgagaagttcaaggagaaggccgaaaagcttgccatgcccgaggtcgtcaagaaggtcttcgacgaggagatcaacaagctggcacacctcgagcccgctgcatccgagttcaacgtcactcgtaactacctagactggctaactcaaatcccctggggccagaagagcgtggaaaattttggcgtcaagaacgcagtcagtgttctcgatgaggatcattacgggttgaaggatgtcaaggatcgtattcttgagttcatcgctgtcggcaagcttcgtggaactgtcgaaggcaagattctgtgccttgttggcccacccggtgttggaaagaccagtatcggcaagtccatagctcgcgctctgaacagacaatactaccgattctccgttggtggtttgaccgacgtggcagaaatcaagggccaccgacggacttacgttggtgctctgcctggccgcattatccaagctctcaagaagtgtcaaaccgaaaaccctttaatcttgatcgacgaggttgacaagattgggcgtggtcaccagggcgatccgtcctctgctttgcttgaacttcttgaccccgaacaaaataactcgttcttagaccactacatggatgttcctgtggatctttccaaggtcctcttcgtctgtacagccaacgtgactgacactatccctcggccattgttggatcgtatggaactaatcgaattgtccggctacgtggcagacgagaagatggcaattgctgagaaatacctcgcccccgccgctcgggagctgactggtctgaaggatgtggatgtgaaccttgaacgggatgccatcgaggagctgatcaagtcgtattgccgtgagagcggtgtccgtaacctgaagaagcaaatcgaaaaagtctatcggaaggcagctttcaagattgtccaagacctaggcgaggatgtgctgcccgaagaggcggcacttacagaagcgggcaaggctgcccaggaggagtcaaaggagcatgagccagccgatcctgcgcaagttccggtcgagccggagaagtcgaccacagagatccctcgactggctctcaaggttcccgacactgtgcatctcagcatcggcaagggaaccttgaaggattacgttggacctcctgttttcacatccgaccgcctgtacgaccagttccctcctggtgtcaccatgggtcttgcatggaccagcatgggtggagcggctctgtacgttgaatgtatcctggagaacgcattgaatcacaactcgcgccccgggctcgaaatcaccggcaacctgcaaaacgtgatgaaggagtccacccacattgcgtattcattcgctaagtctgtaatggcgcgacaattccctgagaaccggttcttcgaaaaagccaaggtccacttgcactgccccgaaggcgctgtcccaaaggatggtatgtgaaacttatgttggttaatattgtaataagtcggcggctaaccattccaataggaccctctgccggtatcaccatggctagcgccttgttgtctttggctttgaaccactcccttgagccaaccgttgccatgaccggagagttgactgtaactggtaaggttctgcgcattggaggcttgagagagaagactgtggctgcccgtcgggctggtgccacaaaagtcctcttccccgcggacaacacatctgactggcttgagctacctgaggtgagtcatcaaaatcattccattcttagtggttactttagctgactgtttactctagaacatcaaggagggcattgaaggccacccggtgaactggtactccgaagtgtttgaccttctcttccccactctcgaccaggaggctgcccgtactgtctggcaaaaagcattggccaagcctaagaaggagagccacgaggtcgaggaagagtagcatgctgatacctatttgggtttgggtttcctctttgggtaatgtcgtatatacctgttgtgttttacgttgtataggatttgtgtgatttattgtgtacatggcgtctttgtcttccgacacggaatgcatggccggagttgaaggactgctagtagaccttttcccatgtgagagctgtatggattagagcgagagccaaaaaaagattactccactcaaagcaggaggtgtcctagtaaggtacatgtatagtctatagtgctattgccagcgataatgcaaagataatgcaggcctcacatgcactccgtattatcgagtcatattaatgtatcccgatttagggctgctgtcgtgtcatatagattgacgccaaacaaacagggcgtgaacggagcccccaatcaggcataagggtcaggccgcaacgcattctcgaatttttgatctgtgcgccattcgatgaatcatatctttactcgattttttactccctcacccttgtgtcccttagaagggcttctgattgatctcctgcaaggtccttttgcctccaaacatttcgaagccttgcagcggaagcatctcatcaccgctatcaaacggctgcaggcgattccttaggggagaaaatttagagggaaaaaaaaagaaaaagaaaaccacttatatctaaagaaatttcgtcttgaccgacatattctctcctccttttgcacccgcccttttaccttatgagcttgtactggaccggtctcccagcctcgcccattgcagcccgacgttgtgcgacacttggacgttggacctcgaagtgaaccttccaactcttcgaactaaaaggagactatttggaactggtgggacgaaaatcgtgtcagtgcgacacctaactttcctacctccttgaccctgtctcaattcttatggacatcggagaatcagccagcggggtgttcgagtcgttccttgcacgacagagcggcttgccgtatggccatctctgttcccaactcccgtagcccgacgcggctggctttggacgacaaaggcggaaatccgccaaagcagagcatgtggcaccggttgggattgcgaaaattatggcagggccgcgacgatcatcgagacacgtctgccggggagagtcaagacgagatttccccccgcccttcttctgacaactcgcgtaccaaacaagacaatttaacacgtcgactctcgcgaaaagttggcgtcggtctaccccgagccaccccctttaaacgacaaagctccgatctcgagcgactggctcctcgagaacctgatcatcgccgtgccctctccgccgaccgccgccccttgaccacccagagaagtaggtctccaccgcccaccgtgggccccagactgtccgcgcccgaagttcagtggctcggcccgacgcccacaaccacggtcgatgaccctcccgaaccagaatccgaaacgaacgatacccacgagattgacgatatcccagtaaatacgcatccctattcgggaatggagacggataatttcggggtgccagaggaggaagatgacggctcaatcgatctggagatggagctggaacaacggtggattttgaacctgagcatgcacttccgagatgggacagagcgagagaaattctttgtgacgtacgcggagacaccgaaccgatggcgccgagtaacgatttcctgcgattaccacgatgcaccaccctattcactggagcgggaattgaaggagctgcggtatcaacgcgacaaatgcgcgcgcatctacgaatccattcgcgagtcccttcttgcgatccaattctatgaaggtgtcacgaatctcaggctcgagacgagcgatggccgcttacatgttcatgtgacggaggacgtaaacgaaacaatcccgtacccgcctatctccagtgtgaggcatttggtcaatgcccctatgatccccgaggacttgttgcatttcgaatctcatttatccggctttgtttacaaaataaacctggacggacgtttttttatcaagaaggaaataccgggccccgacactgtggacgagttcctttacgagattaacgctttgcatgcgctaaaagaccgtccaagtgtgatccaggtggaaggaatcgttgtcgatgagtggcgaggtgttgtcaagggcttgctgattagctatgcagaaaatggcgcactggtagacattctgtatgagcaacgcggaaaaacgagctttgcgcgacgcgaacgatgggcaaagcagattgtccagggtctttgtgagatccacgaatcgggctacgtgcagggcgatttcaccctcgcgaacattgtggtggatgcagacgacaacgccaaaatcattgatatcaaccgcaggggatgtccagtgggatgggagccgccggaaatcgccgctaagatcgagagcaaccagcgcatctccatgtatattggcgtcaagacagatctcttccaactgggcatgacgctgtgggcattggcgatggaggaggacgaacctgaacgacaaccgcgacctcttagaatgggcgacgacgcgaagattccagactattaccgacggatagtggacatctgtttaagcccgactccgcgacataggctctctgcgaaagagcttttctcaatgttccccccactgccggaagcacgggtatcaacgcctgttcggtcactggaggacattgccaacgagtccaggcacttgccaatcaggaactgggctcagcctcagccgggaatgatgcagcaagatggccactattaccccgaaaaggaattttcggaagattcctacggtaatctgcagcactccatattctctgaaaatcacgacctcctccagcgatcaacaatacctctcgcagaatcgaatggagacatggggttctcatctaagccatcttcttcctctaccttgaatcaccacgaacctcacagccatgacgagtacatggatttctcccgccaattcaatgatggctcgtcactttacccaccttcttacagtcagaatccagaagctgctccagtttctcagacaaggtcaatggacaatggcttccacaaccagccagtggaactatcagcctttccaaatgagcctgtctatctcgaaagtgcccctatgaataatcagcaagagacacccaatgagccgacctatcgtaggggctctccaattaccgcacctccactcccgccccccgtcagcacatgtcttgctgaatcgcagaaccagaaggctctcaacccacccagtccaagggccgccaatgacgagggtaaacttgaagcctcagctttgccaattaaccctactttgcgtgactccagtacatcaagtggcactcaggccatccctttttcgacaattccgtcttcaattaagcaagcaaagcaagacggtgtggatcggccatgtgcgaagttcgccaatgaccaggatgaccttgaatcctcatctttgcccctcagccctaacttccgtgactctgagggttttattagccttcgatttgggaaagcttctcctatcgactcaccaaaggagaagaatgcggatttaccatgcgcaaatgtcgaaaccgaacctaaatcaactgagccattgccctcattatcatctctatctctctcggaactacctatcagccctactttccattcttctaaaacttccctcggcgctttgggcaccacttcatcgctgaactctttgcctgtcgaaccgtcaaggcaggataacttcaatcgaccacgtgcagaggctaccacctgtaccaagcctatacccacaacacaatccaactcaacaccttcccagcttcgcccgacatcgtcggccaatcctactctagctcgctctgagccttcacccgagcttccaagcgtccctcaatcagtgaaatattctcctatcgagccaccgaagcaaactcatacgaattcaccgtgtgcaaacaccggtattaaacccaaacttaccgagccatcgccctccacatcaagtctggcccgttcggaattgcctatcagcccaacattccgttcttccgtgactcccatcaacactccaagttccccttcatcacagggcccttctcctactgagccaccaaagccggagatgctctatgagaacgatatcacacccacattaccgtcaacaccacctcgacttccctcaatgcacatttcccacctccgccacaccggggcttccattggccctctaccattcgctacaagtccatctgtcgttggaattggactgctaagacggccatgggaaaacccatctgcaaataatccagatgtcaagtccacctcgacaatgccattagggtcagtctcatccctcaaccctcagacttcaaagaagcaagagagcgccaaaaaatactccaaccccatcgaaccgcaggagaatgaacattcactgaactccaactcaaatctgctgggttcgagattgccaatcagtcctgcccacccaaattcaacgcctagttcgacttatcttggggttcatggctcaccttcaagtcaggccaaaccgggcattttgagccaggcacgtttttcctcgaatcgaatatagtcgcaaatacatccccccgcacaaacaacttcgccctgataggcaagttcacacctcgaaccaacgcaagatcactaatatttttacaaaacaatcttgctacattggccgacgacgccacgacccatttctccgaacgagccccatattcggggccgagcactcgatacccttttgatttgctctgcttgtacagtttatgcctcgtcgtttgcctcgtgttattcagcttttggaagcattataccgatggcgggcgaacctggagtcctaaaaagtcctttgtttttttcttctttgcattttggcggattttaattggtttttgctagggtaacagcttttcttttgttttcccctgtctcttttgtgctctctttaatttccttgttgtctattctatggtttgtcggaggccctcgttctgcgttctggtgttctcacccgggaagtcgatgtatattgatgggatttttttatacctcttcttgtctgacagggctgtattatttctttttttcgttatttggcaatgcaattgttggctaggactgactttcgcattctaaccgtaaataggccctgctatctccttccatggagcaatgatttctttatgcttgatcatagacaatgaactctcctcatttggcaaccaaacaagattcaaaactctcccgccaaggctctgcacttggccctagtcctcgtccaatcagcacaattttgcactggagtggtttagacttatcctcggtatctataggctccgcatctcgaatctcgaatacatcccgcacggcttggatgattctgcttttcccattatccaggatcagtataccttttaaccgatgaacctcaaagtctacggggtgtggttcggatgagactgatttcgcaggcgcagggaacgttgtatcccacaagacagagcgcagccaggcatccacacagttcaccttatctgccgggatcggaggagtaacgatcgcaatagtagaaattgcctggttatagttagaatcatgagagcattccctgtttgcaacaagcaggaaacagaagaggatataaacataccgggtccatatggctatgtcccttcttactgaagtccaaatccgccaggtgatcataagcatgcaaatccaacacaacgccctcaatctgcggcgtccgactatgatctgtcacatgaatcttagccacgctgttaatagaggcaacacgatctcgcacagcctccagctcctcgtctgtgacgagatccgttttgttgaggatcaccacatccgcatgtgagatctgcatatgcgccattgacagaacagggccagaaccgtggtcgtggtgcacgtcatgcgactcggccttctcttcaggcgccggctcatccagcaagcgcatgatgttctttgcgtcgacaagagtgacaattccatcgaggtagatagagctgcctagtccttcgtccatccagaagattggggcgatgttgcccgggtcggcaagaccagtggtctctagaaggatgtaatcgaaggtaccgcggcgttccatcaacgactcgatagccattacgcctgagtctttcacggagcagcagatgcagccatttccaacttccatccactcggtcacttcttggccgccctcgtttactgtcattggtttttcaatatccattgctttgtgataatgttagaatgtaagtttttagtcctctggttggacaccttacagtcaccaaattctggaaattcattagcgacgtgtatcatatctcacaacccggtgtaatagacgaaccgttcatgatcaccgcaattttcttgccgtgtttctctgtcaggatataattcaagagagtcgttttccccgcccccaggtagcctaatcggcgtattagtctcgttttattacttaaatcaatatgcactctattcaatcataccagtaatcagggtgatgggcacgcgagctgttggttcttcatctaccgatgtttggtctgctggcgttgcagacacatcgataagctccggaggagcatcctcatcttcaaaattggcagacataatgtgctagtctttgaatgttgcgtaaatacgtagaagaacagagtctgaagaaacctcgtagatgcggcggatgacgttgtttcccaaagtagacgttagggtacagggctcgggcggtcagcggttgttatgttgatggttatctttagcgtctatgcttgctctccatactcgacctttgatctcattaacacagtttgacagggcgtctagagaccattcactctttttctgtttctcggtttctctcatttcatctagcgccctcgttttactgtcgtcatgactgctgcgggagtctccccgtcaagctccccgcggcttcccagtcctcctccatttactgaggttcagtttgggcctcagtcgccatcggttggcgactcctttgccaaagatacagacctgcttggcgtcgcgatgggacaaaatgatggctcgacgcgcagaatccggccagggaccaaatccgccaacatggcatctggtccaccagtggttcccctttcgcaggttagttgctctccactggctattttggacattactgataaatacagcttgattctccattccagctccaggaacacctcaaagcccagttcaataagcttgcgccccagtacactaaactcaaggagaagtacgatgtgcttatggagaagcacgaggtgcttatgaaggagtacactgagcagaagcttaaagcatctgacaaggcggacccgaactacgatgtgcttatgaaggaatacaatgtgcttctgggggaatacaataagcagaaccccaaaggatttgacaagatggacctgacgagcgaggttgcggaagagccgacagaaccctcaggaatcgagatggcgaaagagccgtcaagaccggggagcgaggttgcgaatgagctgacaaaacccccgaagggattcgaggagacggtctggaaatacgaactgtgccgcttcttcactatagaagccaaccgcctgatcgagggcttcttctctgaaagcccgccctgctcgtcgcaaacttgtcccgagatgcgagtcaacgattggcagtacatttgcgcgggcgcaggacacccggaagccaaatactgctgcgcgattgactattgctgccatactctggactgggccatgaatattctcacctcggagaagattttccctagccgacttagattgtcaggcgatcagaacaccagaaaccgcttgcatgatatcttccgccgcctttaccgtttctttgcgcacgcatggtaccggcatcctgctgtgttttcgaaagtagataatcatggtggtttgtacgtctttttcaagaccgtttgtgtttactacaaccttgtctcggattacacaatcccccttaaggccggaggacctgatgaagccgcagcagcccagaaaagggaagcggccaagaaaaggagggaggaggtcgagggaaaagaaaccaaggaaaaacctgccaacagcaacaaccgtttcaccattctacgcaaggaaagtgataacacattcggtactgctgtggagagtcaagacccggcgctcctcactggcgcgaccacccgtcgccataagcacagtccctccacaggatcgcgtgttacaactatcgcagaggatgcggaggatctggaagagattacgtcatcgtcattgcatgagcccctgaagcaatcgcttgaaccgcggcctgtttctgttttggaaatacggactccaggggaacgtaccgtcacggatgagccaattgtcgatgtggaagaatcctctgaagagctagttgaggaacctcaggaacagccaccgcaagaaatccatgagcagccatctgaaactgccgaagaacaggagaatagtgagcaggttgagcagaccgagcagaccgagcagactgaggagtcttcctccgaagagccggccacaaacacagaatcggccatcaacaagcatgctacggaaggcgatgaaaatacaacttcccacgaagaggagactccagctgaagagctcaaagaggcggtcgaggcggtagaagagccttatgttgcccccgaaaccaaacacgagccagagaaggaggaggagtcatgatatcaaaaccctctcgaacctttcatgccaatgttacacgactgtttgtatgtattcttacccttgatcagcgatgagtcgcaattctttacctaccagatacttttttgtaatatagttcaggatattgtttatgaccaatgtcaatgatacccattttcctgtgctttctatatattcatggataaaacaaggaatgtagtccgcgagtgaaggggacctcggagtcccgaggtgtggtttcgagattgatctgataagcgcttatcaacacatcgtccgacatcaccgaaaagctaccggggataagttgacaaccttcttattcacctcaatatctcatatccaactccaaaatgccagctctcaaagctaccacagcgccaatctactttggctccttcattgtcacaccacaggtaaattgctcatgatccactcaacccccagtcttctcaaccaacaccaaccacgttatatcacagaactagccatagacacaagtacaaccataaccatgaacacaactaacgccaacacaccaacaggtcttctacacaacgtccctaaccttcgccctggtaaacctgaaaccaatcctcccaggccacgtcctagtctcaccacgccgcgtcgtcccccgcgtcacagatctcaccccagacgaaacaagcgacctcttcctaacagtccgacgcgtgggtcggatggtcgagcgcgtatacggtgccacaagcttgaacatcgccattcaggacggcgcagacgccggccagagcgtgccgcatgtccatgcgcatataatcccgcgcaagtcggcggatttagatcatgccggtggcatggatgcgatttatgacttgctagatgggcaggagggggatttggggaacgcgtttaagaatgctgctcctacggaagagggtgaccagtctgcgaattcggggaggagatctaggctcccggttgtggataatgagtcgcgcaagcctcgcagtgaagatgaaatgaaggctgaggctgatattttggcgagggaaatggagaatgagcctcttgattaattgggtctatgtcttggatatgaaggtccgaggcaattgtgtatatttgaggttattccctctaccgaagcttcaattgctcgcggacatagaagttccaggtagaagctgcggtcttgtggcacggatgaactttggttggatcgactgtattacaaggtcaaataatcaatcgtgttcctccctcattcgtattgaattgaagactggaaaagctgcatagaagttgccgaggcagagctacacgtacttaccagataaccaagtttagtggaatagccctgtagtaaccatgtgctctcgtgattcgtcctctatggtatctaaagtacccggaaaaatgaaatgcaaatgtaaaaatgaagaaacaaacgccaaaaatgcaatgggtctttcaaacaagcccagtgcatgccaactcccccgtcacccattccctgcaataatgcgcaagctgcatgcatatttatgccttcttcggcctttcctgaatgacttccgcagcccaggcctgaatctcgggcaaccgaatgcgcgaggcgacgtgggtgaattcggtgagatcaaccttgtccgaacgctcatactcaaccatttgcaacaggagctccatcttgtcgatgtcatgcacgaagtgggcctcaagagtctcatccttctcgtactcctcaaagatttccttgattttcccgcctgagaaggcgcctccggggaccttgtcgaggagggtagtagcgatgtattccataacggaggcctcgcggcgagccttctcggccttggggatgtggtagtcgactggagtgatatcgccgacaagcgcctcggccatgtcgtggatcaaggccatctttgtgcagtgcgggatgtttatcttggttgccagggacggcggggccatcatggtcatgatcgacatgcgatacatatggtcggagatggactctccattgataccgaagcggcgccagccctcgcgcttggtggtcttgaggcgctcaatcaagtggaagaaggggacgggtgaggtagagttctcctctggacggtaggggagggtagagagcactacggatattagctttgcatagtctgaaaagaggagtttgaggcttaccggtctcggggctccattcaggagcgtcggacgccatggctgatgttattgaagagagagaatgaccgagaggaagaacgcagcacaagtaaagaggacaattgaggaggggaaaaacaatctacaataaaggcgggtctgataggcgctgcaaacagtgcaaaccttccttatctatgtttactctccgccgcctgtttactaaagtccccttccacacaggatggctgcaacaaggcctgttcggccgaaacccctagactggccgggtccctcacatttggatgtgtttattcgcagtctaaagctattgcatctggaccaacgcgaggattggccgggtatatctctccccaccttgagcccgacaccacagaaccaacgaaaccgaatccgactgatagaatgggccttgtatcacctctacgcaatttgggatccagagagcgctcacaatgtacagttactcaatcacaagcctccaattcgtgaacttggctgacatcccctacagaaactccgacccttcttccccccgttagagcctctacagtccgtcaacctccgcgcggctttatttcgatgcctaggcgaattgaaaaagaatggcgatctgggaagggagattgtccttcgcaaaaccatgctggatgattgcaagggcgataaattcgaggagctccttgctagcttctccgcggccgttctccgtaaagttgtggcggtgtccgcaaacgagatggtttggaatcctgccatgagactttcgaccacgtcagccatgaccccgaccgactaccggactctcctgccgctcattcttgcccaccaagtatctcttggttctgtgggagaacgccatgcccgagttcaagaggcgtatgaccggttctcgaagctgctggatgataaaggggtggagctgaccgaacgtgcggatcaaggctcaggaggtcgtatgaatgatatgcagagtgatcccgagatggtgcgtgagttacaaacaaattggctaggcagcgaggaatgggccgctgcactgctccaaggcggatcacaaagcaccgccgacgcttttctggaactccctttctcggcggcatggatgcaggcaaaaaactcgaatgtggacagttacagcagtggcttgaagcaggatttagtccttgatttggaggctcgcgttctggcccaacgaagtcgactgcacaagtggcacgaatataacaagtccctctcaaaggaaagaggtaccgacgaaacgagcacagcctctgctaaagaaccacgtgtgttattccgggatcaccagtctctcacaattgctagtatatcgaaagctgttcgtcagtctggggatcgcgggcggacgttgaaagggccggataaatatctcctttcctctgtaaatgaggcgctctctcgcatcaatggaaaatcccgcgtcaagcctgcaggttttacaccagaggttagaaagagcagcaaactacaattcagaagcttgtcggagattgtcagctcgccatcaacagtggcagaagactaccacaccccaggtcattcaccagacttggaaaccacagggctccgttcagagcctgagaccgagcccgagcccaagccacatccagaatcagaatcagaacatattcaacgctcgcccccaaccgtccggctctccccagacctcccctcgtctgacgaggaaccagctccagaacccgtcaagcgctccgataccttggccgagcgcacgcgcagatcaatgtctctcctcccacccgtggcccacgaagcgccacgacgacgacgcagaccccgcccttccttcccagtcaaccagttcatcactccgcgaaaggcttccacgcactcagctcattcaagggatgatatctcgcgtgcttcgacgccgcaggatcggctctttgaggaagatgctgagtacgcaagtgtcttcaagtcccggccgcgtgtggcacttagtcctatctcgtcaccggctgtgcatgtcggcccctcttctgaggaggatagttttgatttggattattatgatgatggggatgagagtgaagattttgagtgggggcatattgattcgcctctagctgctcctcgattgaggcggtaggttgtgaaattagtcaaattatacatatgtacctatacatacctggatcttctctgtggggagggtcatttctattgcgttggacagaaaatatactacacacggatcataaggatgtcttgaataatggacggttcatacgtgaaatgacatggcgatgttgttgacagtgagttgattaatagtagcaagtgactaggtaaggttacacatcacttggtaatagacagtttcaattagttcaagcccagcgttagagtgctattggcttgactccttagatcatgcctccgtatattcacgggtataagattacgtttataaggtttaacatgaagcttatctcgaatcttaatatactactccgtacctaagctatggacatatagatactccgtatatcaattctaataatatttttgagcaaggtagaagataataaagaaagaatgtataactgaaaagtacatttcgatagagtaaactatttgaagtacctcaaatagcggtagagcagtctagaagcccaaaatacttctcaaatatcattggattataatttctacaggctttgtaaaaacaatatcccaacaacaaaaaaagccaaggattttaggtgcaaatgggaaagtggatctgcgacgaggaatcccataggacaagatgtgagacgtaggtaactcgtggcagtcactacgtgtttggccggcatagccctaattggtatagcctgcctaggacccggttatacatgtatattgtccaactagatatgaaaacagtagacggtgaatacagaatgacccgcacgggaagggaaggtcgagtggggagtgtctcccggaagatgaaacactgacgtttgagataaattggggacctcggttttcgagccctatactaatgttaaatccttggaagtacttggcactccttacctatatgcgtacttcaactgtacaatagtatagataaagtgtgattctaaattggaaaaagtacgtcgtactatgaagtagtaattgcatctgagatcctagtaacctgcagcggccataagcaagatcaagctcctagaaacttctccacgttttgccagcgtgacagagggatcaagtctccggaggcccttgctcatagtctggcgatcttactctttgtagtgtgtaaatgctgtaattgccctcgagcattggtctcgagataattgccccgccctcgtgcgctacttaggcccctcaatattttcatgtccgaatgttcatattttgcggatggtgtcctagaaattaagattaaatcagaatcttcccttccgaggttcttcggcgtcaacttctccctcatggcgtctccctccacactggctcactccctaggtcataataccttgggaaagacagatatcgctgtccagtcggtccttttgggtattgtttttgtttttgtcggtctgcggttatggtcgcgacgattccagtcgctgcaattgaatgatttgttgattatagttgcgacggtaaggctatctatttcattgcttattctcagtgattggcaccatggctccccgcaatatctccacaaagctgaccataaacatatagttcttgatggtcggtcgctatgtggtggaaatcatgatggtcgtgctgtgtggaatgggactgcattccacagaggtagcccaggtccgagggtctgaggttttcgtccaatttaatgaagtaagtcacaatgagtggcatctatttgactcttgtcgatgtatgttttttaaactaaccctaccatcagcttacatatgcgggtgatcttctctgggtcacggtgatcgcattggttcagctgtccattctcaactattatgtgcacaacttcagtcagcgagctctgaccgtgttagcatatattatcacggtcctatgttcagctctctgggttgcgagcttctttgcaacagcgtttttctgcaccccgccgaagagaatatggcttgccgacactccgggtcattgcggtgatcgagaaatgttgcataccagtgtcaatgcgagcgaggctgctctcagcttcttggttgtcattcttcctgtttcctggatgtggcgcataccgttatcgaagaccaagaagattgcactgatttgtatccaactgctagggctagggtgagtaatccgtgattgtatctggacgcaacgaatatatatattacagacctcatgactaaccaataccctagaatcatcactattattgccatccgcttgaaaagcgagtttgacctcgacccagaagacacaacgtacagctcagccaggaagtcaatactttcatgcatcgtgcctcctctggggataattgttgcctgcctcccaactctggagccagcaatccaaagcatgttcaggaagccagcgcttccatctacagcccataattctatatatgatccatcctttgcgaggtattggaaggcgacggtcctttcgggtaaggggctggaggaaccagagatgcctctggtcggtcttactcagcccttcatggcaaagatgagctatcttgctcctgggaatatacaggtcacttcacattgggagattcattcgtcgcgaggttcagcaagacttgatagatcacccgtgcggtaggtccgatgggtttgatatcgggatatttggggcttatatagattgaaatgcatagatctagacttcagggctggtacccgaaatgaagtaagttccttttgctatatatttcctcaaagtacagtagatgcatatttaataaaagttggaacggaagtcatactcgacgagatgtatggacctgaaggatgaagatctctatgcatatagatcggtttacgtgcctcctttttcgcccttgaattcttaattacggtatacagcaagcctaggagagaaaatctacttaataaaagacgaaggcgtaaactagtctacatactctcaaattggtaaacatggctatgctttatatgtcccggccgctgagtcttttcataacaactcatcgtggttggccaattggcctagtggtaaggcatccgtttccggtgcgggagatcgtaggttcgaatcctgcattggtcgtcaactttttgctattcttctataggaatacatttttgcgtctttttagttactgcagtcacgggtgaatgctgggttgttagggcttcatgcacattaccgcgcgaatttccctttcccttctagtacttaccccctgccgcttttttctcactgagtataactgagcatggatgccctggtgtattacgtaatcatccgtttcgcgcagtggacatcagctgagcagctaataatccactcaatgcgccctctgtttttctagaatgtctacaggcaggtcagggcggagaggacgaggatttgtcagcttaagtacttatgatttggggtctcaaactatatcagagcaacaagcccatcatccttttgagccttcgagattaagatcactgatatatatgactgacgatggataatgcaatctcgacggactcacctcgtcagccgaagaaagtgacacttgcatgcgaaaaatgccgtgtccttaaggtcaaatgtattcgacccgaggaaggacagccttgtactaagtgggtatcacatccctgaccgtatacttacactctggttaatttgagtagatgtgccagatcaaacgctcaatgcgtattctcagagccgaaacagcgagctcgagcttcacaacgaacgaaaccgtaagtggacgtggagggtactcccctcaagatgtcacttttgctgacaggcgatgaaggagattagccgagctggagtccaagctcaccaatatcattggtcttctatcacaatctggcgcaccccttcatggagtccaaacacccgttgatccagattgtgggctggctgcaattcctgaatattccaacgacaacccacacccaacagctgaatggatgagccaagggtacctggctgatcctgagttgaacgaagccctaggggcgagcgaagagcagaataccaccgaagttgtcccagaaaagtcttgggacgccactgcgatagacgctgcatggatcaccgaattaggactcggtcctgtcgtcctcgagcatcttctagacaagttccgcggcatggcgtcctattttccgtttgtgcagctttcatacgcctggactgctgcatcgatggctgaggaccgccccttcctattacttgcagctgttgctgctgcttcctcacagtactgtcaccttcaagacgccctgatcagacaatttaagcagactctcagtcagcgggtaatcatagctggcgaaaaagatctagatctgctccagggattacttgttcaccttgcctggtaagatttcagtctccatactgccttcgcggcatcggaggcaccggcaagctgaccaatgtcaggtaccatttccactttgttccaggaagtgcacaatactaccagtacttgcaaatcggaatcggtatggtcattgagcttcgccttgatcaagaggctgccgaattgcttgagcaacgaactgagctaggtgatgcttatatccgagaagcatgccgtgcttatttaggctgctattacatgtctagcatgtaagatgccattccccgccagatacacgccaatgagcttgagctgacttggatagaatatcaatgtcttctggaaaacccaataatctccagtttcacgaggccatgcttcgatgcgctatgatcctgcaacaacagccagaattcgacacagacctcttgatatacccagtgacgaaagtgctacagttcgccgaggaagtctgcgagacttaccaatccgaaggcattcatgggactcggctgtacattcatgctgaacgattcacgacgcggttagaggaatggtggtcgtctctatcaacggatcttcgcagcacgggtaggaccatcccaagctctgggcttttgaattagctgattgagaatccctagtgttgctgatcaactgctatcataccgtcaagatccggattcaagaaatgggcttggtatattgctatggacagagaaggccaccgtctccaaaggcacaggaagattccaccatgttatccacacccccaatggtcatcagcaacttggtcaaatgcgtcagctctaccaaggagtatctcgatttgttcttcactattcccgctgtggagcataacagcttgccaatttccgcatggtatcaagttattttgacgatatttgtgctttacaggttgtctgtgggactgccagaagtacctgaatggaacggggagattgcacaggaaactgtgaatctagaggaataccttgatacactgctgtctaatctacaggctattaaaccatcgcgagataggcaaatccccaccaagagcctcttttcaatgatgcatgagatcattgggagtgtgaagaattcctatgcattgacaaaagagaatctcgcacatgttcatgatagtcaccatgcacatcacgaccttgcttcaaaaaacacagccgcatctgctcaagggctgcaccgctgccctgcgttgcggtattcgagtcgccgcatcgctcaagctccggatcagcctacactacaaaacgccattgctacggaagtccagaagataggagatgagaagctgtggggtgatattctattgatggatgcatttcatagcatgacaggttcatcagctacagcgttttgacaagttatccatgctccagacctcaaccctgcaagcccaaaataacatcagatctcgttcggaaagacatgggtggaaatctgatttccggccgaatcgtatcggtggggcagcacattgaaaagtccatcaacatcccgcggttcataatcaagcgacaagcccgcgagagtaagaatttccagcccaaaattctctttgatccagtgggcaaccatatccatgcccgccactgctccactcccagtccagatattgccatcaatgatccacttcttctcctttgtccacttgacattcgggtacttcttcttcagccaattgtactcgacgttattgaccgtagccctcttgccatccagaacgccggtggctgcgacaatcccagcaccagtgcaggtcgtgaacagcagctttccagcggcgacatggcggcgaataaggccctgcagtttcggagcaagattgctgttcgtaggactatccccgccgacgatgagaatatccaattccgggacgtcatccgcagtgaccgtaggcatgattgtcacagagcttgtaagcaggtgcaccggctccagggtctctgcgatatggtggaagacgaattcgggtgcctttgctataaggttcggatcgatggggttgaagaaactgatagcctggaggagcgccttactcgcggaattgagtacatcgaatggtccgataacgtcgatcgcctggtaattgaagagcagagcgccgacgtggatgggagccattttggtaggtttatcaaagacaaatgtcaaaagaagttgatttgtttgttgatttgcttgttgatagtcaataaattgtgttggctgtctttgctacttaaatactttagggctgccattttctgggataccataatcgcggagcgggattgctcgaaggctccgccctccgtggtcgacggtcttggcacggacaacgaggtaaactcatggaccgtgtccgtgatttgtggatttgaaatctatattggaagattctagagctttagagtgcgaaattgagtatcgagatgcttagagtaaatgttatgaaggtatatatccaagagttatcgatcttgtctcgttacgacttggtttccctatgtctaggaagttttgatcccagagatgatctgttcatactagcagatctagaccttcaagaaacggttcataaagatttgttagtatgtacaacatacaatgtaggtcctgtaggcggtgatcgtttggaaggaggggtaacggtaatagagcaaccgaacacccttttttcaatcagtcccttcaagtttcctaccatctcctcagtgttaaaagacagcctaacacaaaaatgcatatccctctagagatatgtgaccaagtaaacactctgctcctaaggccttaggttcggtgctaattatctacacagattgcgtattatgtctggctcgatgacggccgtgctctatatctgtgggacgctgcaaagcattactcggtaccttactggaggagtcgaaaagacttagggaatctgcgtcttgtcaacaaagctttctgtcacagtgccgcatcctggttgttccggcacattgatgcgagatacagcgcctgtagaggacccccacatcttgaacgacttatgaaactatcaaaaagcccctacgctgtgtatgttcgtcagattgatttcgggtttcaagagacgggctcggaatctaccgcgtataccgccgcattgtatatcgaagacctctttggatgcctgtcatcttgtttgatcaagttcttcaacctcgcggcgcttgaatttcacgaaccacccctgggcctttcacaagagcagagaagggcctatatggatgcggtttcttcgactttacgttacgtgccgctttcaaatttgagagaactggagttgaaattccccctaacctatgatttcggacgtttcttcccgacccagaccagttcggtgcagatccctatcgaggatgtcacgcaaagtcttcgacatcttggattatattcctgtgaatatacaaatacgcgggaccaaaggtactggttgaaaccagtttcgccagaaaatgctgcactcccgaacaacgtttatgccacccgaatgttacggatgattgaaattgcgccaaatctccaatcgctcgcaatacatagtctcgacgttctggatattgactttctcgcctttccatcctctctctgcctacggtgtcttgatctggggggagtttctatttcatgcaataatcttctctcacttatcaaccaatctatccacagtatacgctatatcaatttctcgcttgttaaattgaattctggaacatggagacaggtcttggtacgaatgtgccagttaccatatcttcttgatatcattatcgatgccagtgggtactcgttgactggaaccagctctgatctagctcttgggctgcttccagaacgagattgtcctcaagatatcgaaaccatagattccttcgatgtgcctgccttaggcaacttacaaagacatgtcaattcgaacaggatcgcttttgggctgcagccattcccagaaactgattatcgacatatcaatggcgcctctttggagtatatgctagatttataccatgtctgatttaagactaaacttcactatcgggtgttttgtcttcgtgtcatttttatctacattcaagattctgattggtgaacttagaacgcgttttattggaactactccattgaggggcgacatttttttaactcagtaatcgtacattctccagtttttactcctttagtcccgatgccagcaacaatcaacgacatagttatatattgtaagccgggatatacatcggtttcctagtaggttgtatgtttcttgatcgtacttcagcaagtctaagtgttgctgttcctataagcattaagttgagggcagcaaccagtgagcctccgagagccaatcattccaaataaaatactacgttggtgacctagcgaagtgagagcaaaacagtactaggataaaagatattgcaccttaagcagtctcagtacctaaaaataacccctgcgtggaatagctttcagctagtggctttgccacctatagagcagactgagataatgaaaatgcatggtcgcgcaggagttgtggagaagcagcgcgccgcagcgtagttcgaaaacccctgtacttgccaatagtttctaagcgcagcatgcatgaatttgactacgtgtatgccttgggcgccagactaaaggttgggcagacaaataaatctctctacaactacatctgttcttcacgcggcatctacgtatggttagcattccgaccagcttcaatgttataaacatggttaaaaaaaattctattcggctttactgtcctgggtgtgagagggggaattttcggagtttggttggtgctagaaatcatttccaaaagaagcgtcactctctccagtgtcctatttgcgaaaaaatctttcaggatgagacggcgattatacaacattaccaaagctattataccaagacagcctcgccgggtagagcaaacgatgttcaccagatatcaccgccaagtgtactatcaagcgcagcggtgacacccgttgtgcggtcgatatctatgcccacagttgtccccgatgagccctcgagactcatcgagcagggaccggaaattccaggtggtcatttgttacatgatttactggcttctatgccagcactaaacatcaacgaaggccctatactaggtaaggaacctcgtatctacccactgagtaatccgaggcttatattcattccaacagaagctctaccatgtgttgcatctagcactgcggcttatccagcatatatggaccttctggagcaggatctcatcttgcgatatctacgttcgaggtgccattcatgcaatcgtcttgagacggaaggatatatcataggtcccacaaccatcagaaacaagaaaagcccacgcaaaggatcaattccaacctatcaatttcgagagacacctagcacggagctacaagctgcgggcactgtttgtgccatcgcccttgactgtgagatggtcggagtgagaaacggtcgccaaacactcgcttttctcagtgcgatcgactttttgaccggcgaagtgcttatcagtcgctatgtgaatccatccgaggaggtgcttgactggagatacaagttcactggcgtgacgcaggccattatgactagcgccgttgcctgtggtgcagcattcggaacctggcgagaggcacgcgataaattgtgggagtttatggacgattcgaccgtgttggttggtcattctctccagtacgatcttgaagtactaggcatatctcatgcaaaagttgttgattctgcgatattgactgctgagactgtctacccttccattccatcaacgaagccattgacccgcaactgggcgttgaaaacacttgcgaaggactttttgggcttgaacatacagactagcgattgcgggcatagtgctttagaagatgcatatgcagcacgagatgtcgtcatctggtgtatcaggaacccggaggatcttaaagtatgggcggaaaaagctcgactccaggaagagaacaagctcacacagagccgacaaaaatatgctaaaagcaagtccaagggcaagtttcctgccacccagtatactccaatttgggaacataatacagtattcgacgatgtccccgaagattttcgatggtgggattccgcggaggagtttgaatggtccaaaggatatgactcttggtctgattgatcctggaattgcgctcatggatttcctgaaatatgcaccatttttagtcattccttccctcctctgccactttactttatgtcgttgattgattttggaaccatttcccgagtgccaggcatcatccggtacatctgtcactatagcgacctatgtgtcgcgaacaatttatagctgtcaagattggccaatcctatctacgtaccatgagtgagcgctactattatttatttctcttatatagttaggaaaagtgaactaagacgagcgaaacctcgagggcggtgctagtgattgacgccttcaccgccaacttcgccgagtccggacctgagacgcgcagctgggaactcccgaatagttacaggcattacaatgattggcattcattcagagtacgtgcaagtcatacctcgctttcatgacctaccatactcttcagccaaaactcgacgaacttcccgatgatccggtccttgggattcttcaatttactttccaccccgaggtcgacgtcttcgacgcatcacagcgcgcatcaacactctggcagaagtctttacgctttgtttcgactatccctggttttcaaagactctattggtcatcagtgaacgatgtctcgccatgtcagcagattatcgtattgatccagtgggaaagcgtctttggctggaaactatttcagtattctcttggcttcagcatgatgttgggatatatctcccaagcctctaatcgttgcgtccaaattgatttgcacatcgaaattcctgactcatgtcacctcgaactgatctccttccagtttccagcagctctatctgcttctcagctagacgagaaatctggtttcgaagccaaatggggaagcgcgttttctagacccgtcaatggaaaagtttctagctctgaattagcttacgcctgtgggcaatggctccaaagagacaaagactcggaggaccagcttttcattggcctgctcttttggaactcaactccacaatttgacggccatctgcagcttcaagagggaggcagtcaagatctcacaaaacatatagcggagcttatcgaagatgcgatgcatatggtctcggcttgcacgggccagctcaatcacgtatcagatgatcctcttccagactccccgcagtgtcaaatcaagcatcaagcttttcaagcagatgtaaaaccagtatacagcgccaaacaagatcgaaatgagtctggtaaagataagtatcatgtggaaagtatgtcacaggcgcgaagaaccccccgggaacgtatagctgctgggcccgctagtgcatggtacatgatggcacacataactcagcatcatctaccccttgaaatcaactgttctgaggcggattgcattcaaatgatttctttccgtgcttagcgtggaaacacaaaggtgcagtgtcaacttgaagcacttcgtgcgaaattatggaaactaggagattgccccccactagcttggggtaaagaaaaagaaagtggaggggacagcgacaaattcttactattccttggtatgcttgccttctctgacatggcaaaatgaattcatatctaggtagcggggttgactccattatcgacaagtattgagaaccactatgtcgtcttcgaaaagccagatccctggatgatcaccgatatggcggaaagaaggagcgcgagaagccaatcgctccacagtcgatttttgatgtcccctgggctacttaaatataccctcacacgattttaacccttcttagacgtcaagaggcaggtcatgtttctctcctcattagagacgcttttgaggtgagaaaaacagtcggtctagtatagtgcacagtcagccgaatgtttaaatatatagtggtctttcaaacatatgcagccgctccgttaatagtcgcacttttatgtccctaaagaaatcaagacgattttagtccggtttgtgcatagtgaaagtgtcctaaaatctaatacctactacatctccgtcactccggattgctaaccgaagatgatcttagactccatgactgagcctactaggttgcgattgatctaatgctaatgacagtctccctgaagtagtgtcagcggaagacaagcgatggtacagtcctattattaatgcctccctcagttgtacttttggtagcttttaggttttctataaaggtatagatagatactcactccgctgagagttttcgttaaatgtacgaatctgccatatgaggatgaacaaaaggccccaaagataataataaaagtcccatcagtcagataatagggagaaaaaaaaagataacgaccaatgcaggattcgaacctacgatctcccgcaccggaaacggatgccttaccactaggccaattggccgccttgtgtagaagataatgagatatatgcataacaaagaagaacacaaaatacatccttataaccaacatacagtgcttatgtagatcgcggtctgtaaataccaaccaaaggttgaggtggagtttacatatatacgggcgctccgaccgatcattaccagtggcagtaaacaaatcgatgagatcccaagcaggaggcaggatgtctcccaggaacaaactacaaccccttaagcagggcgtattgcctaccaccaatcaaccacccggaaagaagctcgcgggattaaatgtccagggcagaagcactagcagtgcaggtcttggatcctacatcgtctcccacgattagccagggtcatcccttgcatagcagggaggtgaacccatgatcgacggggagatttgtcgaaatcaagcatcggtgcattcctgttgaaggagaaaagaatccagccacactgtcagagcggcgaaagaagctacaggattcgccgcgaggggtgttgatattggagcaggccgcgacaacaccccttcatatctcagttctgacagaatgcgaagacgatccgtgctagaacgattatagaaagtctgaaatcccccgaggtgactggcattccctcagacgttcattaatatcccttctttgttttttatttacaaatccagctccgtcgctcgccgacacttcctttctttcaccttgatacttgcgatacaggtctacagccgacacaatggttaagactacttacgccctcacactctttgcggccgtcagcttggcggcccccgttgcgcagcttaccgggcgtgccgaggcgcagggttcggttgagcacaagaatatcattggggatattcctcttcttggacctatgctcgcaggggtatgtgcttttagtcgataaagagtggaagcaaagaaactgacagcaatcgaacagaagcaggatgccaagcgcgatgagcaccataacctgatcgacgagcttccggttattggaaagcttcttggcaacgttagtttacccttctctctcgaatagagatagacaatagagtattaaccgagaccccctaataggacaagcagaaccagcgccgagatatcgggaaagatggtattagtggcctgccaatcatcggagggctgttcggaaaggtatgtatcttcagccagcagtcatttaagggacatgatattgacggaacactagcacacacacactggtggcgagaatggcatgaacaagcgccgaggcgtcgatcagaactatggccagaatgccgggcaaaatgagggcgagaacgcgggccagaacgcaggccagaactcaggtcagaacgctggtcagaatcagggacagaatgctggccaaaaccacgatgaaaacaaaggccagaacgagggccagaacggaggtcaaaatgccggacagaacggaggaaaaggcttggaggacgaactggaaagcagcctcaggggtattcccatcgtcggaaatctcctcgtgaatgtatgacatgcgttatcaggcattgaagcagtccctagaaccaggaaaagaaagctgacctaacacaggaccaggataaacagaagagcggaacccctgccaagcagctcgatacccgccaggcgggccattccaagggaatcttcggtgtcctgcagtctttgactagcagtggtgtaagttctatcccaggccacacttttgaggtacacaagcgctaatagtccaaatagcccgttaccaagagccacaagcgcgccgaggagttggagcaactggactctgctgcgccgaatgcgaacgagactaagcaaggtgccaagaagacagctgcagaacaggcagcaaagccgagcgagagctcaggcggcctcctcggcggattaatgggcaaggatggcctcggtgctctcaagggcaacgctcaccacggccttggccttttgcccgtatgtgccacctactagcagagaaacagctcaccaagctaaccttcgtttagatgcgtcgtgaccaagctcccatcgagggctccacccttgctggtgttcttctcgagggtggtgctttgggaaaagtaactaatttcctttctggtggtgctatgcccaagcctggttccagctccccttctaagatcggtgatggttctgttgcgggtccccctgaccctgcgtctggtgctggtcctcactctggccctggtcttgctggtgagcagaagcaggcctctggtgctgccttctgagtaagctatatgcggcacaattgcgtgtgttttagttcttctcgatcaaattgtgacgaggattttatgaaattagttcgttggactagtcgaccgacattggggatgtgcaatcggtaatgctattcagttgttcagtttttgagttgtcatttattcttccaaacaatgtcaaatgctttccttgattcgatcataaagcgaagcttcagtgtaaaaacacaggcaattttgaagtctgggcatagaaacccgcaggaaaacccaagccctgccacgtaatgagacagacagacgaagctgcaagaagcgcaagcaaaaatcaaagacaaaatcgttaatcgtagccaaatcaaaaccggggtttccggtccggaccacccagttaaagagcgcccttggggggtatcaggtcgttacacgcgatgaaatcaaaaacagccataccactcgagatggaaaaagatgctcggaaaggcgaatcgcagcctaatcagagtcatacatgtccacatcgtctactaccaccgtcgtgcccaacgcctccttcccttcgcggatcatcgcctgcaactgcttattcaatcgctggagactggcatcttcttctcgttccttgcggcgcatcttagcagcctgtcgctgtatatcggcagacacgggggcatccttcaaccgaggggatggcaggcccccctgtcccttagtaggcgagtggggtccgacggaatacgcagtccgtttagtgagccggggcataacagcggatttccgacgaggactcgatgcccgaaaagcgcgtcgtgtgcggagtgacgggctagcaagctcgctgcccgcgaatgcatccgagctcccggggaccaccacccagctcgggtcaacctcgtcgtctggatattgaccgggcactggtgtcgagcaaaacgtgctcgggctgtacatatctttctcggcggatgggctggttgggggcagccagctggattcgagagttgttgctgggctggatgacatgtcgtagccctggcctcctcctgcgtaaaaccctcggaatgcgcccgtccagcatagatcgaggactttgctcacggctttgatcacggtctggccccagcctgtgggtgtggtgctggggctgtcggggcctgcggatatgatgccagagtcacggcggctgcgcttgcgactgccgttgtagtctgctaggtttgctgactcgtcgctggaatcgaatgagggtgggaggaaggattcgcggtatcggtttggacggtaatctagctcagccgaagcgtgcaagtcgttgcctccgcttacgcttactgagcggtagttgggttggatcatcggagacccggtaaaattggactcattatgtgccgaatgtttctctgtgttacgacgtggtcgcttgcgactgaccgagagagaataaagcgacgtggaagccgttgaggctggcactttgaatagctgggagggtgcatttgagaggtcgagtctaggagagttgaagacagcgtgcatgtctggcattttgaatgaaagaagggataaagacaaaatagatccaagatcaaaagatcaaaagatcaaaagatcgaaatcggagaaaaaagaagaatttctgaagaagaaaaaaaaagcgagaggttggatgttggccgtggcggcaattagtgttttccttacaagtcacttctttgtctcgcactatttaaaccccctacatgacctcatatatcagatccatttggaaattacaatcgctggctggtccattgtattccagctgcctccaagccctcatcaccatcaactaacacacaccatccctcgctgccccgtcctccatcgcccgcaatcaccgcctcaaagtgactctgggcgtagtccagcacttcctcatcaaaggtgccaggttgcaaccagactgcagggatccccaccgagtgcgcttccttcagcaactgaagggtcacaatcgggggagtcacaactgagagagaagtctgcgccggcgatggcaaaccggccggcgacgggactgtatcataagcacgcgaggggaggttgatttgcgctgctcgcggattcagcggtgtcaccggtagagagtgttcatgataccaggccaggactgtaattatttagttctctatccaaatgccaacagagcgtgttgccctactcttgtatccgaacttgtgagtgtcattgctggcccccgccaccgcaaagcggggggaagagaagaatcgcttgactgctgacattgtgctttaatgataatccggtagaaggaattgatttatgttcttgaagagtcagatagttttgttaagttggaaacggtagccaagtaggaaagttgcaggttgcaagttgcaggaaataagtcaagcgattgcaacctcggccgatgacgactatcccttcatctcccatctccgacattcggcgaacttccttatttctcatcttcacattcattcgtacaatttatgccaccatttctcccccgcaagcgcgtatcctccgaggacccgcccccggccaagcgccaggcccggcccgataattctcaagctcctccccaagctccccaagctccgttccacctctccgattccgactccgactccaactctttgagcgatgcacctgaaggtctcctcaaggaaaatgcctctgcgtccgaagaatccgaagatgaagaagaggatattgactgggaggatgcgatagacacaaagaccagcgtcactagacctgtcgcggccccggagctacaggatctagagttgactctggaccaaaatgagacacatgtgtctgatcttctggagggcaagaaagggcctagtaaaattgagcgccaaatccgaatccagacgcactgtatgcatgtccaatgcttgcttttccacaacgccatccgcaattcctggagcaacgattcgaaagtgcatgagatcctgcgcaaaaagctaccggaagggattcagaaggaagtcaagaaatggcgtatagcgtcgggcctagaacttccagagccgaaacccgaaccgaagagtaaaaagaaaggcaaaaaggccaagaagaataaagactggagtgatgagtccgagcgactggaaccaggccagccggatatgagccgtggtgatccaattatcatattgatgaaggtgctggtcgcatactggaggaaacagtttcgtatcacggcgccaggattgcgaaagtatggatatcggccggtatctgcccttgaaactgcaatcaccgacttccgcgaggaggagcatgacccggagcgtcatggtgagcgtatcgccaacctggatgagttccgcgcgaccgccgagcgtatgcagggctcgcgggacgtcggcgcacagctcttcacggctctcgttcgtgctctaggcattgaggccagactggtggctagtctacaaccgttgggctttggctggaccaaaggagagacctacacacctctcacaccttccaaggcagataaggaccccggggatgaagaggagtcggaaggatccgagcctgagactgacgctgaaaacaaagtaccagcgaagaagcgtaagcaattcgatgcggatctgccatttcctatctattggaccgaagttgcctcgcccgtcacgaatgagatcatatctgtcgacccgcttgtactttccaaccccgtggcgccatttgcagatacagatctacaagcaaacttcgaaccacgcggtgcaaaagcagaccgggccaaacaagtcatatgctatgttgtcgcccactcgtccgatggtactgctaaagaggtcacaacaagatacctccgacggcggacctggcctggtaaaacaaaaggcttccgaatgcccttggaaaaagtacccgtaggccagcgcgggcactacattgcctttgactggttcgggatggtaatgcgcgggtaccagcgagcccgcaagagcaaaaccgcagtcgacaaactcgaagaaacccgagatttacaacctaaccaacccgaaaagaagaaaacagctcaaacagccgatactctccaaagcctccggacctccaccgagttcgtgctagagcgcttcctccgccgcgaagaagccctccgccccggcgccgagcccgtccgaaccttcatcgctggaaaaggcgtgcgggccaaagaagaacccgtcttccgacgagcagacgtgctaaaatgcctgtccgctgaaagctggcacaaagaaggccgcaagccgagaccgggcgcggtagcgctcaagcgcgtgcccatccgcgccgtgaccctcatacgcaaacgtgaagtcgacgaactgcaccgccagaccggcgagaaacccctacagggtttgtacgcacgcgaccagacagagtacatcatcccgccgcctattcaggacggccgcatccccaagaacgaatatggtaacattgactgtttcgtgccgagtatggtgcccgagggcgcggcccatgtccccttacctggtaccgtgcgagtatgcaagaagcttggaattgactatgcggaggcagtgacggggttcgagtttgggtcaaagatggctgtaccggttattcagggtgttgttgttgcggccgagaacgagggtttacttagggatgcttggaaggttgaagctgaggagaagaggaagagggaggagctgaaggcagagaagaagatcctgcagacgtggaggaagtttctatttgggttacggattatggagcgtgtgagagatgagtatggaggtggagatccagatgctgatagggagcgcgattcgcataatcccttcgctgtggagaagaaaaagcgggaggaggaatcggaagatgatggcgatcaagaaatgcctgacagggagtcgtcatataacgcgattgatcatggtggtggctttcttcttcctggtcatgaagatgccgcagacgatgggttgatcgtcgagcaccatgatcagcagcagagtcctgcaggtccgtctcacaccgattatgacccggatgacaacgagccattcgaatctggacctccttcggagtccccgccggtgtctatctcatcgggttcagataacgaggtggataataatggcgaggaggaagcagaacctgaatacgttcctcgctcgacacgacgaacgcgagggcgttaatggaatcaatgtatgtacgcaccatccatattgctggggttgggttgtgtttctactccgtacgaactggtcggaatgccttcccatgcaaatagattttgtcacagaattcgaggatactcccaccaaagcaagtctattttacgttggagatctcagatatagtcatacgactacttttccaatgttcattacgactaaatatgccaccagatcataactctcttattggaaactgccttaccgtctctattaccaccttcacgaacgctagttctttcattcgcaagaccatatggcttttacactgtagtagcccgtaattcatcctaccttgaaactagcaaacttttcaagtcgcttggcttggtatacatagcatagaaatcaaataaatcaaattgttaaaaatacggagcgcaacaaaaatagttaactcggggtcaaatattccctactatccaaccatcgtctgatcccagcctagggtcacgttaggaaagagtgcaaagccatacatggatagctcctattcggatatcgcccgatacataattccacaccaattggccaagacgttcttccttccgcctttttggctgagatcaaaccagggcgtcgagctcacatataacatatgtgtaggtgtgggaccatcaaaagtctccatatactcataactgatttccaaatggaggaaacacatgtagtgctgtgtcgcatggatgattacaacactgccgaggtcgttagtacatagttcgaatgaataatgttcatagcgaagacattgaggctttcgatgtgtaggaatctcactcatgtcagtgttgctggctctggtcaccagcccttcgcaaaccatctgcgcaaggcttttatcggagataacaggtttctcatttcgaagactctggaattgcgtcttcgcttccaatatcgcgacatgattgtctacaagcataaaacctccgtctgatttttggcgtcgcaaacaaaggccaccatcgtcaatggccactatccgccggcggttagttattgtagtggcggcaacccgtgtcttagcgtctcggaactcgacaatagtggaccttggcgctggatgttgaggggagcgaagtataagatatgtctaatcacacatgacgcaagtcgcagagtgtcatcttctggtgttataccttgatgctgtgcatcaaggtcgagatatcctaaagatgaatcttcggaactgtgtgagctacggctactatgcgtggagccaatctggatttcgccggaattggtgaagtctgactggtctatttctcgtctgacacgcgaggactgccttcttgcaagctcgctctcatttccttcctgggtaatagataggccctgcacgcgccggtcttggttccctctgaattgggccattgctgcccagatttgtccttcagcgattccgtaaccagtatttagcaccaagttgtgctcgctgccagccagaagtgccaggtcgggtccttccaagaacgatgtaatttcattcgggaaaggccgcattgtcgaaggcatatatcctgataggatgggaagcagattgtgcaacggctcacgcctgaccacgcgacatgcgagcaaatgagcccgaccccaggaactggcagccacatgattcagctctgaaaaggtctttccattttcggcttgaaagcgagctctgaaggtggattaggaggtgacactgctgaaatagggagtggcagacatatttactaagtggatgtgtgagaggtttgaagaaaattgtcattttcccccgctagatgaagaaaaaggcctcgcagttgctgcctaatgcgtagcagcctaggcagagttgcgcctaacctgcccatgcctacaagttgattcgtccgattataccctgtcatcttgtctaggagcacactagacaaccagggttgtttggtgaaggcggtcagagggggttctattaggcggtgacactgtccctggcattatttccatcatcacccttgtcatcaatgctaacaatggtagctgattctgggccacagtcctttcgggatctcgtgcgaaaccataatcgctttcttgtaggtcctctacagtggacctcgtatcatctcgatctggtggggtgtcgattcgaagatgtcgcaactcccctgtctctgtcacgcttgtctctacagattattctcattacgagaagggtccacgacatcgtattcactgggatgaaattaacgatcctgaagtcttggctattggtccgcgacctgagatgaagcgtgagcgtctgatcaaaatcttggtaggcaaggattgcccatttgcacatactaggtgggagctacaggctggtagtatgaccaatatacccggggtaactgacaacttcaccgagcagcaagggacctcctttcttttttgatcgtcggtctattcaccggccagaatatctcatgtttcataacagtcaagaatcgatcgaggatccctcacgctcattattgggctatgtgcactacacatttgtcaatggatctcgcaatcggcaatatcgtccagctccagggggacgtagcaacgagatcggttggagaatccatctaaagcggaaagctcggacaactccaaaggaatggaccgacgatccatattttgtgtctcatttgttggctcttgcgcagctaaaagaccgcaaccgcaccgtcaatccatcaaaaccaatcacttacactgtatgttctgtatgcttacattttattggtctatcgcgtcccagctaatttgctccagtcacgtcttctcgcgactcacatacatgaaaaacattttatcatactctatgaggcccagatcactaccgaggtcctgaatgcgctcagtcattggagggatgcaacaacccccatccaatggcctacaattaagcgcaaaagaatcccatatcagccttatgatacgtttgctagccggcttatagcggagataggggaatctaggccttccgacagtctgtcaaatatatcagatggtgtggatagtgtggatgagcacggtgggaaacgaccatacgaaccagaagatagcgggtcatccaagatgatgaggacttcaaaagaggcgggtctataaggagacctgggggtagcaaattcatcggcataatggactttcttcggatggacaattttgggggcgtttcaggggcgttgtatcaatatttttcatgttctgagcatgagtgatgactatgtagtattctttcaaacagctaacctgtgtttattcttgatacatgactctctcgttcacaaagtttgcataccttgtcaatccttagcacatttttcataacacatttcatcctaaacaatcaagtagttattgcgaagagcttgttgatggtattgatttccgagtaactaaggcacttcatcaaaaaaaaaaatatgataaactatcacaacctcggtatgaagatcaaagcaaaacgatcaaataccgtgatagccaagataaaacaaagctaattaaggacatggctcattcaccaaagccgagagacaagcgtccaccgccccatttaagcagccgtagtcgaggaactgccagaggaagcaccgtcgtcgggaggggccccactaccaccaccggcaccagcattctcattctcaacaccaccgtcctcagtataataagccgcaggggtaacagtggtatcctgtgtagggtccaaaccaacagtgatccaagcgaagattccctcggagatatcgtcgcccagatagatgtattccatgaaggggtcaatgacgtcgagctcttcgccgagaatgctgtcgtcggcgttggtggtcacttcctgtgtgttggttgagtaaggggcgacttcgtcggcggcggtgatgagatcctggtcgaaaaagatctgtccgacgtgcgatgaatgcgtggtgtagaggccggagatggtgccgttggcgaggactctggtttcgttggctgggtgggcgagaactatgtgtttgttagtattggaattggcttaactaaggggaattgtgtataccgtggatgtgagttgcccggccagtgtaatgacctgggaaggttgtttggaactgaacgacaccgtccctgttactcttctggatacctcggttgaaggtcgtgtcgaggttggtggaatcgttggagtttccgtttccgctggcgacgactccagaatagacaccctatgatgatcgtgtaagtgaaaggttcgtattgtatgtgatatcggggatgcagtatacttacagtggagttgcagtgccacaagtccgtgtagagctgcggaatgggttcgcaggtgttggtgttgatcagctggatgtccaggtagagaggaataccttcctgggactcggcgatgttcttacgaacgagctcaccggtgacatctaaaccgaaacagcgtgagtaagattcaatcacaagaaagatgggaagctaacagtagggtccctgtgtcacctccggtccgagaatgcatgtcgcctcggcgccaaacaacacttcgggatcggtcgaataatccacactcgtgagattggagtgatgcgaggtatccagggcgtcatcggagcgcgccttgaggaagtggttggctatgggtcgttagaacgtggtagtatgttgaagacttcaaaacacaaaacatactatgctgaagaccaaggcggcgacgtatgttcttcacggatgtgtgacgacgggccacgtttcggctttggtggcctcgacgctggagatgagaggtacactgcgcaagactgcgcgagtgaacagaggcctctttcaagaacgcagctcgctcggcggcttcggctttgacatcatgtcccgggtgagcggagacaatgccggtcagagcagtcaggccgacggcaacaatggaagcgagatgaaccatgattgcgttatcgaggcagttgaaggtgaatgagaatgaggaagttgaggataccacagatgggtgtcctggggtgttttataccccttcctgttgcctccctggctaataccaaggcggagcatggctagattcaggatatacccgcttcaggtaaaacaacattttgatgaagctgacgagggatatggcgcagtactgggtccgcattgacaaatgaaacgctgcaagtttctcatcgagaaagagatctaggtaactgcggccccctcagcggagctccgattggattccgatgctacatggcgacaggctgcaattgcgtgccgttgataggacatgcgtagactgtgaaagaggcagatgtttagttcggcactaactctaacccgctgatgaatccaccgtcgatcatcctggaactattgccctgccaaggaggaaatcagccagtgaggatttcgcaatttatcatgcggggaattaaggacgcggccctatgatgatcttctttcagtcttcgtcgcagggtgcagatgtatacgtattcggtcttggcggtcccgtcccggggtcccctgcgagatcagtcagcggagaaaggagcgccgatagctttggctgcatatttgtgcgaaagatcaacaatgaacttgtcggactccgagattgctgccggaaagcgtcggatttggatgcatgcaagacaagacacatgtgccaagctttgccttctaaagaatgcatttcccgttatacttgagctgttcggaccttgaatcttgccaaggcgatgacataattccggaaaggcttggcgattgcttgctctccgaagatctaccgatggctgagtgtggctggtggataaatgtgggttccaaccctatgttgagaatacggagtagctcaactggggtattatcaataattcctatgtcaaaatggtcagtatcaagtataaataggttggtgcctaggtgcatggtagaaggagagaatggaaggactattcgttggttaagtatcaaagtaagtgtagtaggaataaggacacccagtggcctagttggtaactctatcgagcagcacctgctctagacaaccctctaggtcaactgcctggtttagaacactgtcgagaattacgcactcacggctctgggttcaaaccgtttgtccacttttttttaatccttttttttttctcgttccctatattagttcctgaagtatcaagaagtaaaaaaccagcaaacagccgttgtttaagtatcaaagtcaatgtaatagtagcgaaccccagtggcctagtcgatcatgagccatacctgctctaaatcactctctaggtcaactacctgagtttgaatctcctagaccgcgagtcgctgtcgagaacttcgcactcttgttcttttttttccagtatcagtttccgacaaaccttagccttgaaagcatacaggtatgcgatagttaaataatgcctacgaggattaagagaaaaattgtatcaaaaactatcagaattaattccatcatgttaaatgcatattcgtagatattgaagcaatatcgcgttaaaccgtcagctcatgatagagaaataactgaagcaaggccagccaagagggctgggacaacgtaaatggtaggaaacaagagaaccactacgcagaaacagtccgatggattaaacctcctgctgactcacggtagggttaatcttctcgtccaatccaatttcggcagcaaaggtgctgtgaggctgccacttggaggaagtacgaggagtagtctcttccatcatcttgtcaacctgctcaagggtcagacccttggtctcgggaatgaggaagtaggtgtagacaaaggcgcaggtacacagcgaaccccagatgaagaacaccttggcacccaggttacccttgtcggcatccgtcatgtaaggagtgatgactgcgatgatgcagttccagagccagttggaggcggcggagagggcaacgccgcgggatcggataggcagagggaagatttcaccgatgacgacccaagcgccggggccccaggtgctggcaaagaagaagatgtagatgcaaatgaaagcgatcattgcactgacggccttggggttgttgccatcggtaacaccaataatggcgacaatgaactggcacacaaccatacccagggcaccccagaggagcaaaggacgacgaccgtatctctcgatggcgtagaaggagagcggagtggagaagacattgacaatagtggtgatcatgctgatcaggaaggggtccttgattgtgccgagttccttgaagaaagtggttccgaagtagaaaatgaagttgacaccagtccacctatggatcattagttcctgttcaataccagggggaaggtgagacatactgctgcatcatctgtagcgaagtacccaggatagtacgacgaaggttgctattagggtgccaaaggcttccagtgaagcagttgaaccaggtgacgaagtatccaccctgggggattaccaaaagttcgtactggttgttggcgtcgatctcattcagctccatctcgacaaagtccgaatcttctggctggccacggatacgagccagtacaacgcgagccttatccttctgacccttgcggataaagaatcgaggggattcaggcagcaggaacaatccaaaggccaagataacagcccagagcatttggaggccaatggggatccggtacgacccactgtctgtacggttttgggtaccatagttcacgcacgaggctagcatcaaaccaatggtgatgcagaactggtaacccgagacaagagcaccacggaccttgcggggtgcaatctcagacatgtagagaatgatgatagccgagacaaatccgataccgaaaccggaaatgagacgaccggcaacgagaagcccaatgctggttgaagcggtctgtaggatgacaccgacgatgaagatagcgcagccagcgatgatagtaacccgacgaccgaaccaatcagccagatcacccgcgatgagcgcaccgaagaaggttccagcggagagaatggagacaatgagcgactttcgggaggacgggatgacgaattgtgctgcatcagtagtagcaggatcctagtcggttagtgggatactagtaacttggagacattgacactcacgaggccttcaaactcttggatgaagtagtccatgccgagaacaccgctgatgtaaccagagtcataaccgaagaagataccaccaaaggcagcaaaggcacacattaagtaggccttgaatgtgaccggggcctcgacgcgcgtggcgtcgatgggcccagagatgactgctccacctggcatggtagcaagtcgataagagtagatgtggttaagatatctagaaagagatgaagtgggatgtttcaaaataagataatgtgagatgagaggtgggaagaagaagaggaaaggaagggattgggaaggaagagagaatttatattctggggaagacagctacttgagctccaaccccggacctacccccatgtctgaaaaaaaaaacacaaacaaaccaaaacactacagggaaacattaaaaaccagtccaatccacatttggtttgggtgctgcataaaataccagaaatctagaaatcggctggaatgacctgtgtagccaagtcggctctggaagttgaccacgcgatcgaaacggcaagtatagaaaaccggggaagtgttgcacggcctaagccgtaaacctgtcagattggaggctctgattggctggaatccccagaaatgatccgccgatccccccagggctggacaagtgaaaaatacccacaaaacacactaaaaacattaaaaaacataaaaaaacaccttccaaacgtccaaaaccaaacagagccgcgcgtggaaactttgaacccccggagatgtccactttgggacaatgggcccggggaaataaactctaattggctggctttcatgggacaataccccacgtgccccgcaaatactttttgtactgtgactcttacatctgggcagtcaacgggtaactatctactaagttattttactcatttactacctgggtaatactactctctgcaacattagacaatgaaaagatggcttagttatgagcccgggtgactggaaaggactgcagttcacagttcaaactactaaataaaacttaactatatccaagtcaatgtcacatcgatggcaagccatccaaagcacagacccaatggacgccacacaatcccactctccactttaccttaaaggaaaaaaagtcttggcgtcaggcaagctgactatgcaaggatggcggtgtatacagtaagatacagcacgttacaagaatgttaggcttactgctttacaatccaaagggggtatgttcctagccatgtctagaaagaagcaaaacaaaaacaagaccatgctcaacatagtcgaagtgccagctcgtctatcaaacataagattcccgaggacagaaatgggcttttgaggctttcgcccacggggaaaccaaccagttacacgtgggagactatacctgtttcagttctcatctccgcattctggcttggctatcacgtgaagtcggttttagtctgaatgagcgggctattgtcgggacttcgtgctggtccattagctgcctcgcgttgtctcaatggcgcacttgatcgtggcatgctattcgatatcacaaactgtgactctactaaacaaactctcccctgctacccaccaaactctggaatggctaaatacagccaatgctacctcgtgctcgtactcggcttacggggtacagagttgatagacaacttgccatatgttgtctttgaaatggcatgagtgacccactttggacatacgatggagacggaagttggatggtgaactaggattctccgaccgaaaaaatgagaaaacagaggaagccgaggaagaatctccgatgccggtgaacactttccgtaatgggcggtttgtgtttcacttgaggggaaaatgtccatgcacgagatcgagtccggagtaagacgtacctatgccctactccatactcattgaggatatgcagatttttcggatctagcggcttcgggttagtcgcctgggcacgtatagatctggtatgttattacctacgtacatcaatatcctctttgggattctgatacatggcctcgaccatgattcgtggactcccgttttttcccttggtcgaatctgacaccttttggctaccaattgcattttgattgtcctacgttgtactcgttcagggatctctagtcggttgcacctgcgtcaagactcgattcctacagaaacaggtaccaggtacaatcttcattcccaataaacgaaactctccgtgtgaacatgccaaaactacgcgccatgtcgggcctgaatatcaagcccggccaacccgcccgtctgccgccaatcttcaatctccttcacataactcttaatcccctctccccagatactgaactgcgccgcccgcaaggcttcaccgtcgtcaaattggagtccctcccgattgaagtaccccggagtgcaatccatcacacctctgagcgctcgggctctcatcaaaaccttcgaagtccattcctcttcggagcgacagtccggctcaatagtaagcccgggcacggtgacatctgggtttcgctccgagatcaacttgccggcttccgaaatgatgtaggcgacatgaacggcaagctgatcgagaacatagacctggttcgctgatgctcctgcttgatacggacctgggaagaacagattgggaaacccattggtcattactccatggagtgaagtcatgcccttctgccatttttccggcaggatctggttgtcacgtccggtgacggtcacagccccgcgatcggcactacccccaagactgtagccggttccgaaaatgatggtgtccaggtcatactcttggccctctaccaagatgcctttctctgtcacagtccggatcccttttccgttcgtgtccaccagggaaacgtcgggccggttgaatgccgggagaaagttgtcgctgaagcatggccgcttgcaccatccaggataccacggcttcaaagcactagcagtagcgggatcggccacagtggtttccacgcgatggcggatcgcctcttggcgttgcaagtccaattgatgcatccgcgttaggtagtccgggtcaagaccggagggactgccgatcagtacaccgagggactgcatcttggtccaaccatcatcgacaaggtcaacatctgggaggggactctcgttcgagcagaaggcattgaaattctccatgcgctttcgttgccaaccggggcctcctttgatcagtttcgcccaccaggtgcgatcggtgaggtgattgtaacgcgaatccacagaagacggtgtgcgctgaaagacaatcaatttctttgcccacccggcaaggtgtgggatcacctggacggcagatgcgcccgttccgacaaatccaactgtcttgtctcgtagtccatccatcatcgggctgtctggacttccgccggtgtaatcatagtcccagcgcgaggtgtggaaaaccttcccctcgaacgtctcaagcccgtccaatttcggtatcttcggtgaactcagcaacccagtagccaagataacaaaatcagactgtatcgcagtggatcgctggccacgaggtttaatattgacagtccattgagaatcccgctcattccaaaccaagttatcgacctcggtctggaacaaagcccgctggctgagcttccattgactggcaatgcgcttcgcgtgtcgcctcaattccgacccgctgacatacttatgcggcggcatgtacttcgtttcctctagcaagggcatgtaagtgtagctctcgacatcgcagaccaagccggggtatttgttccaccaccacgttcctccaaagccacctgctgcatccacgaagaggatttcactcgcacggaggaatccagattggagcagtcgcactgcgaatagcagacctccgaacccagcaccgacgatgaggactcgggtttgcctctgctggagcatatcggtgttgacgacgatgaattcgttcaagtaggcggggtcatcggtcaagtcaacatattgggttggtccgtcagggcgtaggcgtttcttacgttctgcatcatactggtcttgtatattctgcagatcgtcgcttgtctcagctatactggctatgttggtggtaggttgatcaggaacaggaggcgctaggccaaccacagatttctcggacatcatgacaaggtgatggaaaataaatctctacatgtaaccgagcaagacgaatagggggttataaatgccatcgagagcttcaaacagatacaagatgtttagcaatcggttgtgttgatagtttctagcaaacggaaagcagagcaaacgaagaaaaagaactgggcgtatttaggagatacatacgtattacgtataataagtaagctatagttaaattccgaacgcaaggggccatacagacccgtttggaactcaatccaagagctacgctgaaccctcgtgcatattaaaatgggaccggctgtggattcaccgtgataggtagggtatagggatagactgtaacaagccgcagcgagaaggcgtccgcactgtgcctcgtttactctagcacttcagaaccagagggtagaatgttattactgcggactgtaaattataggacgttaatgttatctgagccaaaacgaaaataaatgtgattggatgttatctgatattagcaatttggacccaggcctacattctcctccttagctggtcaaaggttcctcgaactcaatctacatcccagtggtttgcatgctcagtgttggactggggtagtagtgtcctccgcggttcctcagggataccattctcaccgtccccttcgtcctgcacctccggttgtaaaatacgctgataaccagacctcctgttgacagatcctgtgctcatccaactcatccgatgactggaaatccgaacgaaagcaatctgtacaaagtcgcagaatattagccactacaccacaacacaaatctcactatatcgtatgcagaaacccaccttagccgcgagaacaaaaacagccgccgcaaaaaccatccaagacgtccgctgctggtactccctccacggggcaaagcaactcctctgatatcccaactgcaactcacacgcattgtccccgtgggtgcggtccttgaaaggccatgccctgtcgtgaatacttctgagaccacagcattggagctcatcctggattgaccggatagcctgtgagttcttcgacttgaaaaacccctgccattgttgctccaggttacaagagaggatcctatcggggaagaggtacgcgagtgctaatgtggccacgatggtcgatatggctgtttgggcgtgattgagtatacccgatattgtgttccattgatgattgtgagctgtgtcgttgtttaaacgtgtaaaaaggattcgtgtggctatcagtgtgagtattgtggtcggggaatttaaggtcgcgagggctggaacccatgttggcaaagggagaagcaatgcggaggtgcgagcccaagataacctattccgatgttagttattctcgttgattacatgctagttggagatatgatgaagaaggtagtaactcacgctccaaggaccaaggagatggtcactccctagtggtgaggtttgtcaatagaggtcatcgccaggctggtattcaatatcttaccgcaatgaaaatgacatagagaagaacggttgtatctaacttgaccggcattattgtatatttagtcagatgttttagtcgatgcttgattgaaagaagaagaagaagaagtggacgacatgggcggggtaggaagcggtatagctacagagcataagtaccttatttgaggtaccttgcttttcaggaagaatgtgcttcatctcctttctattgagagtttgaaagtgatatcttattcttttacttgttgcagtctccgcaaatttgggcaacagtagtaacacgaatcgatgttctattacttaaatcctcgatgctatgtcaaccctatagtgcagacatcatatatcccacaggcgagtaattgatagcgatagtgcatgatcttcgtaagccactaccaggcctaagcccgaccagcaagttccttttcgtgcatgggctggacctcctctatcgtaggcacagtatccaatgcgtcgaggatgtcagcgcgaggaccggtgaagttctttcttccatccacaaaccactggaacacggagatgatgataataacagcaaatgctgcaatgcagtagtctatatagaaaggttagtacgaaaaatgtcatagataacctcgcaggttactcactcatactgcttcccgtgaccgtgcttgacggagggaagacgaaaaggacggtagtcaaagcgatatatgataaagcgacctaatcatgattagagatgttcggcttcattcaaattccctggcaacatacaatgtcgacaaaccatccaactgcattaggcaatttccattttctttccgggagcgatttgcgcccctgaagacagttgatggcaatagggattccgtaggacaggtcaagagccacgaccgaggcagagataattgcgttgaacgcactagactctgttagttactattgcgctatcgtgggtgatgatgattaccttgaagagccgaggaagatgcatccgaatgcaatgaccacaacaacactaagaatgagtgcgttgaggggcaatttgagtgttgggtggacctttgcaaagaaccgagaggcaggaaggcctccatctctgtgaagagtcagtatacgcattgtatgccaggaagaatatcaaataccttgcaaatgcaaagatcattcggctactggtggtcatgacgctgattatagcaaagaccaagcagaccaggggcaacctataacctcacgtcagtggaagcacaacaggggaaattttcaccacgtacatcaaaaggcagataccacccgcgttgctcttggtcgcatcgatgaggatctgcagaagaggaccggctgcggaggatgcgaccgtttgcatgtttcctgcgacgaatagaaggacgatcaaaaagatacaaccggtgaagactccgatacccacgcaggtaaccatgattttcggtccctcgatgtcggcattgggcacctctagaaacgcgtgtcagtccctctccctaacttctcaaacccagagtaatctttaccttcgatcatgtgtgccacagcatcctagatagtgttagttgaattggtttagtatcgcaatgaccatgacttacaaaggcagtaacgccaagccctccttgaagcaactggatatatgttagtatcattgcatcgttacaatggatgcagtaaacatacacctagaagccatgcgactccatcaggccctaagctgaattagcaaaatcatcataatagagttatcggggagcatacagccggttgtattgacaaagtcacagaacacgaagctgtggatgtcagtagtctgtcataacttgatactgctgaggatctcatactaagctgtgttgtagttgggagaagcgcatgcgagacatgtaattgacacaatcacaaaccctccaatcgaccacatgactacatatattgttagcgatagcaagtcaagctgggagaggtaacccacaagcaccgcggtaaatgagcggcaagatggagttcatgaaggcattgatgatgaaggaaccgacggtcaatccaacgtagatgaggaattgatgccagcgttgtgggacatagctctgcatatcatgttagcattgtaggaagagtatggagtgagcctctaacctcatgaagaaccgagatgatgccgacaataagttgactggagagaagggagttcgtagcgacgagtgcaacctggttgtgtgttaggttgagtaccacattgaatgattgccttgcctacccagcctgccacattgatccagcctgtaacccatgataggattgggactgtgctcggccacgcgacttcgattcgttagtatgaagtatgacgaggtataggaggggaacatactggctagtaacagagttagggttagtccaggtcatatagcataaagggtctgtagggataggatgactcacctgctacccaatgatattgtccaccggctctgcaaaaggatcagctggtaatataccaaaaggggacatgccggagcttacgtaggatatgccgaaagaaattcagccaacgaacatgcgatacaaagattgcagaatcctgcagtaaccagtcctggatgcgtgtcagcgaggtagaaaccaagtatttctaaccaacgtaccccaaatcacactggtacttccaccagatgtaagactgatcgacaaactggccgaaagcgcagtccacgactagcttggttagccaaatatcccggtcgcaatccaggtctgacatacattaagaaccgcaaaggccagaccaagcatcgacctagagagtcctgtcagtatcaagcctgcatatgctagcgcatcccttaccatgtcgaatgactacgttggagttcaggcttatggcccaaagccgccaacttggcatcatcgccttggagtgaatcgtccttcatactggataccggtttccgacgtgaatatttacaaatctaagaactgaggagaagacgatcgctctaagtacgtcccccgttcacacgtatcaggaaggcattgccagacgggttctctttacggttaagctccgataggggattgactattccatatgcggggaagctgtgtagctgcaaagtatcttatcgaggaggcttgacaggcttgggaggcttatcaagagagtttatacgctaggctgctagtcgatgtcgcatggacttgcccaacatcgtatagtctcgccaccggcaattaaaacaacggcaaaattgggcctttaaattaattcttccattcaatcgagggagcttagtaaaatataatgcatcatattgtacaatccaatttcgagatgtcaacgttaagttgctatcttgcaggaatcaggtccccgccttaattaattaattaaatctcaaatagaacataatgccacgtgactatgtttgcttatttgctatatctttatcaactgcttcatcattaaggggctaaatccaatgggaatcaggtagaattacctaccatggagtgccgtttaggcccgtgtgtttgagttaaagcctgctccgttttcttttttttataaatccacctatacttatttctacctactaaagagggaaccctgcaacggggacagtaggggcaccgacatctctgcctgcaaaacaggtgtgagaggagagttatcactgggagttgtagggtgctagagaggagaacaccatggggtgactactgagaagtgaattggaaaggtgtctgcctctcacatggccgcttaatcgtcctacactggaaacccccactgcactacatatgtagtccgcttacaggaatccagcaagaatgataatttcaagtggaccgagcgacctgtgtctgattgtacagctgaatgatgggtttggtgccactattacattagctgaaaatgtcgagagcaagactggttggacggaccgaagacggtgcgatgaatgtggagtcgatgaaggtattgcccagcgtgaggatgcctcaaaggtgtaacgatgaggctcacagatccccccgctgagtgtagaaggtcgatcagaagatgtatgtttttggtaagaaaacagtggcagcatgctgttgaaggcttatcgcgtctttggaaggatccacagggagcagatcaggaaaagcagccttgattgatataaaagaagagaagctagagaagcagagatctgggagaaatggaagaggcagggtcaccttcattaccctcaccttcatttaccttcatccttactgttacgattcactcgtcatactcctgtttgcctatttgcttgattgcttgttcgctagttcgcattagctagattgttcgctagatagaagtttgcattgtttgtaaaggggatagctatattaactagctgctttctactttacaatttgcttcttctttctccctatcttagttatttcgaagttatttcgagtagaatgcactctgcttcctttgcaagatctggcacgtcacacttaccttcatccttaccttcatcaccaattcttcatcgacctttaccagccttgccatcgtttttgctagatagctaggtatctatgtgtcgtcgtagtaaagtttacagacaggcacgcccgccacctccttttgaagaagataaggcccaagtgcaagctacctagggtgtcctttgcctagattgtcgtcaattcaagcttcgatcacatagctgtgacccagtttgccaaacctgcggcgatcattttaccccacagactggctgtccagatttgtgtgatgctgctccctgctgtggctgttgcattaagaaacttattgatgaatcgtctgaatcttttgtgatcggcgccaacgggttgccagtccagaaggtatagttatcttgctacttgtaagtagttcatacccactaatgggatttttcttcttttaggttattttccctcatttacgacccatcattgaaatacttctcgacttattctttcagagtagaccttagaggttgattttatccgtgccccctactataccttagtcaaatctgtcggaggcgtagacgcctttacggatatggtatacaatacgattttaccaggaatcagggcttcttagggcaatctttttaccatggaattgtacgttatgctatcttgcgtttcatctctctattgtggatttattctaattgccctaaacaaaaaataccccgcacatttatgataacgaagtattaggttatatatatagagtggatagttatcgagatatcacctagttgtagatatatatttcagtattttctataatcggagagaggaatgtccagccgagagtcagccctacattgttaagggacggccttgaagaaatgcaatgtacaacatacatttaataatatttggtgattgcaaagttacttcaaatgaggttataaatgtacatgatcaacctgatagcaataactccagatatgcctattctcagcgcatatagtgccttggaatccaccaaatgccaaatccgatcccaggtcccaaatccaaatcccaaactccattcaaacccaaatcgcaaatcgagcagaaaagtacatcctccagtggttcaagacgaccagcatcttgaagtacgatcttgaagtacgaatccgatgttcaatgtatcatcgagaatacgtgtcgagtgcatgttggagttcatgcaaactattcttgtcgccgtacgcgtccatcaactgttggtttcgagccaggcgctgctcttcctctagcagagcttgttcccgacgtaacttggcagcgacgtaataattgtatgctccaaaccctgcacgtgccatagttagtatggcccacaccaccccggaagaatacgcattgaacataccgagaccaattgtggccatgaaaggaatcaggctaaagtaaagcgagtcagtaaaccatcccaaaagagaaaaaaggggcggcataacgtacagccgcccattccgaggcttaaaagtggttctggttgggtttccgtatggtttgttcgcaccggggagagcaaattgagacaacatggtatatattttgtatgtcgatgttcctgggggagtatagtttggatattcaggagtatggaagtgaaaaagggaaaaaagtaaagaaaccaaggagtaaaggagcaatagagcgaaagccggcttaatggggtaacggaagagacggattgcggggaataatgacgttaagtgccgaggatcgcttcttataccgccagccctcttataccgccaggggaggggagatcatgccacgtccactgatcatcatcatacaattgtgtggtgttgtctagagcaaaagtcctacgacttggagtatgttacattgaaatcatatcataattgaatcatcgtgtcgtgtgttacctgcattcggaaaagatcaaacccgcctcgtcagtgtctcgcctataattgattgttaactgcataaattccatttgccgaagaatcatatgagaccgacggcctgaagcctgatcgtccaagtgccttaattgccgtttaattgccattgttctgaggggcaggagttgccggaccctccggggtcacataagcctaggataattcgtcagcgcaatccggggaaattaccccatacggagcatttaccttggtcattccaccatcgactacaaagtccgttccgttcacgaagctgctctcgtcgctggccaggaaaaccacagcgtgagcctgctcaatgggttcaccaaaccgaccggtggggaagtgcacctcccggcggaaccgcttggccttgtcatcacccagccagtcttgcagaagaggggtgctataccgcgtgagctaatctcacaaaaacccagtaggaaaacttactttaggggagccggacagagagcgttgaaacggaatccctcacgagcgtgaacgatcgccaactcccgagtcatcgccaggaccgcacccttactcgccgtgtacgcaagctggggagtggcggcaccaaccaaggccacgacactagctgtgttgatgatactgccacgggacttcttgtggcgacgcagactgaggacggcgtgcttgctgccgaaccagacacccttaacattaatgttctgtgtgaggtcccagatcttctcgggggtatcgatggcatctgcgtcgttggcgtgcatgattccggcgttgttgaaaatcacgtcggtgcctccccagctatcctgtgactcaaccattgcctgcacatccgattccttggacacatcacatcggatcgactcgactcgagcggtgggaaccaattccttcaccttggccagtccctttgcgagggcgggctcggagacatcggccatcaggacattggcaccctctcgggcgaagagaatactggtttcgaggccgatgccactatccaagttcggaatcggttaggcttgtgacggcattgtatttttcagggataaacaatccacatacccgcctgcacctgtgatgatggcattcttgccttggagacgtcctcggggagtagtggcagccattatgaccttatcttgagctctgtttgtataaatggaatctagattagcaatgactcaaccgccaacattacagcgtgtgatatatctatagaaaacgctagaaggaggccacccacatgaactgagaattcgaattaatatgagagttgtctatcagtgtgttgctccaaaggaatatacgcggggcacgtgggcagcgtggatcccattagataagcggtgacggtgtttgcccgaagcggtaaggcgacaccgatatccgctgataagcttccaagctgtccaggtgcgttggcctgtcgatttgcttgatttacccgatttgtctgacttggaacgagactgttatcgctttgtcccgtctttatcttgcttcccctcacctatttctatcctttggatccctatactcccaatctcactctttggccagatccatcatgtcgagccccgcagaccccgaggtcacagtcgagaatgtcgccgagatcctcaagaatgacacaaaagtgaaggtggctggagtcgatgtggatggaattctgcgcggaaaactcatgaagaaagataagttcttgtctgtcatcaccgagggcttcgggttctgctctgtgatcttcggctgggaccaacatgatgcgacgtactataaggagctggccatcagcaacaagcagaacggataccgcgaccttctcgcagtcccagatttgcgcagtttccgtcgcatcccttgggagaacaatgtgcccttcttcctcatcagcttcttggatccagagacacgggagccggtgtgcgcctgtccacgaggattaataaagactgcggctgccaaagccgaggcggcgggctatcgggcgatggcaggaggtatgtccgatcgcagaccagggtgtgtgagattcaatggctgatcaggatattacccagcggaatatgaattctaccaatttcgcacgccgggcaaccatgtcacccccgagcaaggcgcatctgcaacagccgccttcctcaagtcgaatccagtcgatgcattgccgccagtgacagaaggcatgtttggttattcaatcactcggcccctccacaaccaagattactattatggcattttcgacgcctgtgagaagttccgatgcgatattgaagggtggcatactgaaagtggaccaggagtctatgaagctgttagtgccatgatagtacacggtcgtattgggactaaacattgtgataggcactacaatttggcgaagcaaaggacatggctgacaaggcggggttgttcaagtgggtttgttcctttgctagtgcgggctgggccagctaacttgttataggtacgtcgtcaaatcattcggaatcaagcatggcattaccccatgcttcatggccaaaccccgacaaggcctgccagggaacagcggacacatgcacatctcgctcgtcacggccgacgggaagaatgccttcattcgtgataccccggatccatccccgctctaccccgatatcgctcatctatccgacttgggtcgacacttccttgctggccttctcgtcggcctaccggatatcatgccgatcttggccccgacgatcaattcctacaaacgcctggtggagaacttctgggcgccggtcacagtctcctggggactggagcaccgggccgcatcaatccgtctgattaccccaccgacagctagtccgaaagcgaccaggtttgaggtgcgagtgccgggtgcggacaccaatgcgcatctcgtcctggcggcgatcctagcattgggatggcgcggagtcgagaagaagctcgagattcccttgccgcctcttgctcgcggcgaggatatgggcggtgccagtgacaagggtgtgcgtctggccaaatccttgaaagaggcggtcgttacatttacgcgaccggagagtatcgcacgagaagtgtttggcgatttattcgtcgatcactttgccggaactcgggaacacgaggtgcgcttgtgggaggaggcggtgactgattggtatgtgacatcattaccccgtactcattcgtatactgacaagttcacagggagatgaagcgatacatcgagaccgtgtaaatgccgtatttcttctcatatcgatttttgatttacacagagacacgggttagcagaatgaagaattgtacatagtcgcattggcctagagattggtgaagggtgtgtaaggcacgagattagcaggcatactaccccagatatataccaaatgacattcaacgaattggaagttgtcgatttgccggagttcggatgtattctatatatatcgagttgtcacatgccgatgaacacagggtgacgcagaaaaccgccgggacaactcggcttcggatgtgacactctgaaccctgcgagatatgggcgatcagagacaaccgcggttgattggagtttccggggaatgcggagagcttctactccgtacagccactttcgggtgaagcagggggcgaattgtgcaaagcttgctattacccttctttattatcattctaaacaacggtcaagctgtagaactgtgttcttcgaaagataccgacgtggacagcctaatcagactcggtgtgcggcgtacgccgttctaattgcgatcgtgtatagaactaatataagcttaaaaggtgaagatcgggaaatgtcggccgagaggaagagtttcccgtggaaaacccatgaaaagtcgtccatcgaacgcgtttcggtatcagaaagacacagaagagtcgggaaattataagaagcgacacggtcaaacggggaaaatgggggacaatcggctttccggcttatcattgggcgggtccagaacaaccgcggcaacttttgggtgactctgacgtattcgataccctcgggcagatggctatataggaacaatatcactcaggcttttcctgctttctgctctgtggaatttgaaaattgacgttctatacatggaataatactgcacacactacccatctacatattccatacacatacgtcatgtctttcgtcgaaacacagctcaaggatgtcgctatcctaggcgccatcaacaacgatgctcgcaagatcctgaccaaggaggcatgtgccttcttggctatgctgcaccgcaccttcaaccctacccgcaaagctcttctgcagcgccgtgtcgagcgccaggccgagcttgataagggaaacctcctcgacttcctccccgagactaagcacatccgtgagaatgacgcatggaagggtgctcctcccgcccccggtctcgtcgaccgtcgtgttgagattaccggccccactgaccgcaagatggtcgtgaacgccttgaactccgatgtctggacttacatggccgattttgaggattccagcgcccccacctgggacaacatggtcaacggccaggtcaacttgtacgacgctatccgtcgccaggtcgacttcaagcagggagagaaggagtacaagctccgcactgaccgcaccttgcccactctgattgcccgtgcccgtggctggcacctcgaggagaagcacttcaccgtgaacggcgagcccatctccggcagtctgttcgatttcggtctgtacttcttccacaacgccaaggagctcgtcgcccgcggcgccggtccttacttctacctccccaagatggagtcccacttggaggctcgtctctggaacgacgtcttcaacctgtcccaggacttcgtcggtctgccccgcggaatcatccgtggaaccgtcctcatcgagaccatcaccgccgcgttcgagatggacgagatcatctacgagctccgcgatcacagctccggtctcaactgcggccgctgggattacatcttctccttcatcaagaaattccgcaaccaccccaacttcgtcctccccgaccgctctgacgtcaccatgaccgtacccttcatggacgcctacgtgaagctcctcatcaagacctgccaccgtcgtggcgtccacgccatgggcggcatggccgcacagatccccatcaagaacgaccccgccgccaacgacaaggccatggagagcgtccgcgccgacaagctgcgcgaagtgcgcgccggccacgacggcacctgggttgcccaccccgccctggcccacattgcctccgacgtgttcaacacctacatgcccacacccaaccagctcttcatccgccgtgaggaagtgcacatcaccgccaacgacctcctcaacaccaacgtccccggcaagatcaccgaggaaggcatccgcaagaacctgaacatcggcctcagctacatggagggctggctccgcggtgtcggctgcgtgcccatcaactacctcatggaagacgccgccacagccgaggtctcccgcagccagctgtggcagtggacccgccacaacgtcctcactgccgagggcaagcgcatggacaaagccttcgcgctgcgtctgctgcaggagcaggctgatagccttgctgctcagggtgccaagggcaacaagtaccagcttgctgctcgctacttcgctggccaggttaccggtgaggattacgccgatttcttgaccagcttgctgtacaatgagatctcctctgctggtagtgctgctaagctttgaatgggctttaattttatgatgatgaataccctttgtttatttttgtctggtcttgactttatcgccagattaccatctgcagttagcatagttgtataaaatttattttattccgattacttttaccagtatttcgatgagttatttcgttgtagtagatgaattgctaggattccatttcccaccattctcttacaaccgacagcgccgccgttagtcgaggacctcggcaattagacggcattcgaatagaccgcactttaggtcaatatattccgagacgaatatttcgcatacaggcagtgcttacggcaacttataattctcaataatctacgaagataaaaagaaagatatatcgggtcatgtgattaaagcaatatgcgagacccccttgtttcagtttgtagccaaatccagtccaagaatcattccttcctcatattccgacaaaaaagaaatgtcctctcgctttttagatctctctggagataccatcctccaagagcaagtccttggatgtggatcttcagcggttgtagttctgcgtgacggcctagccgtcaaaacacccctaagatatatttggagctcagatatcgacagatatcgaggttcagatgaatattgaagtcatccaacgtgaacaagatgtctatcgtcggtttcaagaatctaatacccaatgtggcggtattgttaactgccttggtttcttaagagaagctacctagctcacttatatggcaaatggcgatcttcgcacctacttagcaaccaaaagaccacctcaacagctccaactttcatggtttcgcgatatggctcgcgcgctcgagtatatccacgatcgacgtgtgcttgtggcagatattgcgagtcgaaacttccttctcgattcagatctaacaatcaaattctgcgatttctccgaagcatctcttctacccttggataccgatatggattctgtcgatgacaacggatacacagctcgaatagacattggctttctcggggcagttatctatgaagttgtgactggcgagaaatgcgaaatcgatctctttaaagataaccttccgagtgatggccgcgctacctggccgcggagagagttccttcccaataccgaaaatgtttggcttggatcgatcattgaagactgctgcgtcgacgggggatttcgaaatgcgcatagcttgctacgagcactagattcaatcactctatattccccaagccccaaatctttatatgatcgaccttcattgacagaatttatccaaaacttggtcgatgggcggtcgattgtaagactggcagtcatcctcggtgccttgggtacgttcgccctatatatgaatagaaaacagctgtcaatgtcttgataatctatgtgcttgatgttctatattttgtttcggatcgctacttcggctgataatatccctctctctggttattcttctgtcaagcatcaacaccggtacgccaagagactatttcagtctattatacctctccctcgctcgcgtacttgtttttgcgataaggtcccaatccaagcttcaacgtcgaaaaatctcacataccaccaaagtcggtggtaaaaaaggtgaccgtgattcaggtggatcaattcggtagcctatgcataatatgggtgacttgatagagaaaatatttatactaacgtcgttgacttgatgttttgcaataggccctcgtatatgcgtgtccgacatgacggcagggggatgcctatcagttaggcaactggacaccgtagcaaaaacattcaatattgtcatcaaagagggttgtttgggcgaagagaagatggatcaaggaggggtagggtaggcacgttgtgcgtgcatgtagatatatcgcctgacattgaaattaggcccctcctactacccctcgccaacaccaatctagaaatattctagtttaaatcgacaggttgattatctcaaggtaagtgacaaaaacactcgaatgatggctaggccaacccttcaccaggaatccacattatgatccacaaagatcttcctccttcggtcgaatccatccgcagaatcatgaaggaactgatgcctgaaactgctacatcaccgaataaactagccgaaaaccaagcagcgatatttcacgaaaacaaaaatggaaacaaagcatatcggggagacttactcgcgaaacaaatctctcttctcacgatacaactccgcgtcacggaaaagctgcaaatcggtactgtatgtccattgattatcatttactttgcagacaacggactcatcagaatataggattggcgatggcatttagtgcatttttcgaaagataccaaacttgagaacgttcggaaggaaggttacttgatcgtattatccaataccatcaccataacgcctggaggagtactcaaagagggatcatacatctatatcatcaatgagcctgtcataagtgcaggggcaactgccatatttattgttcctccgcctcttgactaggtaggacgtgggtacttctatttagcttatgtgtactccgtacatacactttgatgtgttctttcggggttcagactggcaattatttatctctgtaaattactgagaattgtatcatcgaagaaagaaattctcaggttgacgaaataggctcagagaaagacgactcaacacaactcccaccttcgccaaataaagccgatatccacggcgtagcaacagaggttggttgtatttcgggtccctgaaccgttctcgaaattggggtcattgcgttctcgagtccagccatggctcgatcatcttgataggggaggtagtccatcgacagggaatcctcaaaaaggttgtatgaggtctcggccacagcctgatcgtcttgaaagggaaagtggtgcggtcctccgatgggctgggattcctggtttgtctcaccgttcaaattgcttctagattatgcttctaatcgtatcgaagcacccggagacataatgatacgagcatggcgatgcagtggttcatatcggatgggggagtttttaattcccaattcgggttacacatatatattgtatagttgcgattccccgactgtaactgaaatttcctgcttaatgcgagaaacaatgccagtatgcccggagacttgtatctcgcggaggggcagtcgcggactggtgcccaacatcagcgctccccgcatcaaaaagcggagtcatgtgacgtcatgtgactatgttcacgagtcaagcctttgacgtacttcacgtatttcaccagtatccacctcagtttcgacaattataattagccaaacgatactctccacctacaatcacgcgaattccctaatacccaggtaccccctaaaccaggcgatccaaagagggtggtgtagagcatggttgaagtacagccaagggaaatcgttagtatcgtaagatgtaaggagcggacgacaatttgattcatgggactgcaagtctttcgcggaacccaggggttgtcgtaatatacaccagagaccgatgagcctggacgcacggtctgctgtaatgtaaccctaatgtgctatatagttagctcgatcgccatgggagaggctaaaagcccgggattcacgccactgtctcaggattgctcaaactaccatgacccacacgccatttcgcatgagaacaatacgcatgggatcgatattccactgcgctatgaatctttctgtacatctgggacggttcctactaaattcgaaacatgatcttgctcgcagctttatagctcatatcccgaaagctaggtgtaaatggcggaccctgataaagtccggattgtatgtatgacgaatgtattcctgcagcctacaatggagccaaatccctgccctagcccattccttccatcatgcaatgttactttttgaacgtgtccgatactaaataatgagttagctttgaactaagacattatgtgatctgctcttaattgtgctataagtcgacaaattcccctgtctaaaagctcgaatcgtataagagagaaagacaattgcctaagaatatccttcaaccggtatggagtcttatttacaccgaactcttgagagattattgaccccgctctctgttttccagcgcccagtggacctctatgatgttaccgaaaagcttctttggatctttattccttgcggtaacaactgtttcaaccttcgcaatgtcaacagcccgttacacagtaccaattcacgaatcgatccaaattttggagactcgtcaacaactgaatgatatggcgaggcaatacccactcggaactatggacgacaggaatggaggctattatctcttagactatgatgataccgttctagctatcgcatctgatcccctatgtgaagaactggatgctgcaatcgaggcagcagaacggtaccgcagcgcccattccgaaatcgacgatgaaagcgaattcgctacacctacctcaaagtgacagggacaggcacactctgacctgtctaagcgttcttgtacccatccatgctgcaacgcatatgcccgctgtcggacctacagctattgccacgtgtgcgctagaagctatcgttagtgtttctgagcaggtcggagactaggctgatacggaaactctacatgttgacctcaattgtttagaactgctcaaaaccagagcaaaattcaaattcggcgagcttcaaaatcctttcaaattattcgagtcctttcttctattttattcgtgtatatgatgaaccataattgtggatgacacctatgtatatcaactgcagcttcacatattagttattcttctgtttatatagctagtaaaatcgctctctatatcctccacagaatggtacttaatgatgaatctctatacagaaagagacggtggcatttactatagaaaggggcggacccagagaaagactgaaggaaatagggattaagtgttactattcgccacgttcctcgttgttcttctcatcaaagcaaatacacagagccgcgattaatgctgcatccacaccaggtgccacaacaacggcgtaggtctgctggccaaacacaaggtcacggccgctaagcaatttccggtcaatgcgagccaccgttttgccgcttttatggtcgacaatgtcggcagtacgatcgaaccagcctccttttatattgaaaatcaccgccttgccattactatcagtgaaagtggcggtggctttggagccaagcactggtgcagttagtaatgtgtataatatgtctactttgctgaatatcttggatcataaagacggcacttacatgtgagattactcttaacctcacaaatcttctcgcgatgggtgtcttcgattgcataggtcgcatgcacgtgtagaagctccctgacaatatcaaacaggtgcttgccatgggcgtcctcgacctttttgcggccagaaagcgatacccacgctccgtgcactttcaaaattgggtcaccattggccaatttgacgtcgaagctatccccagacgcggagagcaccttctctctcaggactagtgtctgcggctcctttgcgacaaattgttcgaacagggcgattggctcggcgaatggctcgagattgtggtgacccaggatgcccatgacgacaggtggattcaattgaagctttcgaaggataaagattaaataatcaaacagggcaatcgaccacaggagcgcggggtcagtctgaagccgatcatcggttggcgatatcatcacgtgatagcttgaagaaggtttactctccttggctggagcattggtggttgttttttccgatcgcctcgcacctttggtcacgatgtagccaatagttataaacgagtgatttgtgaggcgaattcgaattcctgagctttgttccttcaggagtttctattagcattatagtgtaagtactccgccactagcatacgcggtcgttttagagctcttccacccgaccagctcgttctcttcaatttatttctctccaaaatacccaaataacgaattctgcgctctgtttttgtcaagtgaactatctcttcagcgccaagattgttgatcgcgatctccaacgatcatcactggcccattcgccctaaccccacttcattggtagaattcaaccgaacccggaaaacccggcgaacctcatgctaatatcaaaatagcttcttttcctgaatttaattgatcgttggccagcaacatgctggatattgtgtggaaggatatggcgcccactgtggctgtcgtgggaatctcccttataggcttgcgccggtattccaagttcaccgaggcccaacgagtcgtctttcagattgggcttgtttgctctattctgggactttctctgtttgtcgtgactcagttgctgggtctcgtatcttacaaggatatttaagcttatgtgtgatggggcatttcgcgacatcgattatactgtaatgcgtcttcgcgtgcgcgtggataggcgtgccaattcgcgcgtttctgtttcgacgggttttaagtcttcgattttctcgtctatgctcaccaaatcctccgcaatctcatatggtgcttgatctgagctagattatgggagtacgtagtataaatgacggagccggctaaaaggtccaattgctagcaatttccgctatctacgccggtttcggtaactccaacgccgataataatgagagcgatcattacctaccccgccagacaacgagctatcaccgatcagcgctaacaacatccatccttttcaaccgcggatgttcgacagaaacacgaaacgctcactgggatgtctgcagatgccaaggcaatgtcgcgtgcaggttcgataaaagccgcttcggtagtctttccaaggcgagtgagacattcatataagccatgcaacccccacacattgttgagctttgccctacgccgaggatagtccagggcaaatccaagatcctgtttgaacagcacttctgcctcctcggcgcgattctgctccaggagcaagccgccgagggcatggcggactggctgcatccaggggggcgggtcagagtacgcaagtccatcctcgcgcacaatagcttccctgagaaaggaaaatccgttctcaatgtttcctttccggtactccaattctccagcaagcatggccgaggctacccctagaacgtcttcctccttgcatggtatgctgttgagtcgggtactagggactgccctgcgtgccgcttcaaattctacctgggcattttcggcttctgcaatccgtccaagtgcgctaaacgcaagaccacgggtgtaataaatgatagctgtggtcacgcaatatgtatcacgatccgtgggaagctcaaggctgagaacctcctcccaacggccaaaacgcactaggacatgtgccttgctccccacaaagctttcgataaagtctgccatcgggggacttttgatcgccagcacttgaggatatatgaccttttcgagcttttcggcagcagagattgcgtccgagaagcgaccggacatcatagcggaatacaatttcgcacagatataatgtacccggtaggctgtgtacataattgtgcccgtctctcgggcaaaatagatgtcgtcggcaagcatcgcttgatgattggagtcgataccacggcggtagtcgcccactgccgcatcgatgtgcgtcggcatatgcaacatgtgcgaagcatgcggaaccatcccacgcagtcgatctgcagccggtagagccaattctgggaatggagacatctccaacatgtgtatatacagatgacagagtgccggatgatcgtgaccggtagtctgcttcagccccagctcaatgacctcgcgagcctcgaccgtgtgatttcctgtaggtttgccgctatccaaatcccacagcccgcgtggggtgatacacatcagtgcatcggcgaacagagcagcgacgtccatatcgttgctgaatttctgatacacagggcgcatggcatttgcgtatgcgtggtcaaaaggacttaggtcgtcggggatgtcatggacggatggaaagcgggcaccgatggcttcgatcaatgcctgttcgactggggtagcatgacttaccagcttgcgtgctcgttctaggacattattgaccttctcgatagaagcccggcgaccttttggatcaaagaacttccaagccttgttgtaattcggcccggcagcgtaggcgactccccataacgctatcgcgcagttggggtcactgtccgctgcgcgttggaagcatcgctctgcctcatcatggttgaaagaaaatgcccatatcagtccgcgatcgaaccacagttgggtttctgccgaagaggtggtcactggtcgatgatgcgagccaagatcgtaataggtttcttggtccgaggcaggagatttggactggtccctaattgaggtattacattagaatccgaattatcagaacccgagacactcactgcatgctgggtactatggtcttgcgaggagatcacaccgtggtttcctctaccgtttaggtttccttcaatccaactttcttttcccgtgagaacagaaattgatgatgagcgaatcaagcttggtctagacaggacggaagctgatgaaagaatgaagcatcgagatgataagtggcaaaagagagagataaggaagaagatcggggtttaccccgccttttaaagccacccgtggaccttctgagtttatctacgacatgacccacattagatctatatatcaaggagcatagtacatttgcacgatgcgtctcgacagcaagtgggccgctctactcccggtcattcaagatatctgcaacatctcgggtatcccagggctgtcgctgggcatcgtggagaataacaaaaccgtataccccccttcgctgcacaactttcgtgctagggtccctcaccaaaagcctgacggctgctctagtagcctctcttcatgacgtcggtatcattccctcatgggatgctccattgaagacgttgctaccagagtttcatcgcgaagatatctacggcgaaattactctcaccgatctgcttacataccgtaccgacctagcatctcttgactctctctggctcgcctcgaacaatgttccttatctgcctcgatcggaggtcgttcgaatcctcaattacgccccgggtatccagccattttgaacacagttcatttacaacaacttcagctacgaggtactcggccaggtgattgaaaaggcgtcgggtgaaatatttgcagaggttctgcagagtcgccttctcagcccgctcggtatgcaccgaacatattacacaggggagagcagtgaaaacgaagcgaagccctatgctgcgctagaggacgggtctattgtccctattgcaccgccactgcatggtgagaatgtgttgatggggccagccggtggttttcgaagctctgtcaatgatttattgaccctctataaagccttcatgggtgctgctcttcatgagattattcatccagacacgggcttgcctgatcagtccaagtccaccattcgaggtatcaatcagctatggaaagggcatcaatccctgccctttcattccctcagggagcattcgtatggatttggctgggcccgggccgacctttggcactggaacatgaagtttttcttgaatctccaaatacaagttagcgtgtcctgttgcaaaatcccccaaatgtataatctcttacaaattgcatggttgctacttcagaggctgtggtgtagtgggctggtcccgaattggggtttggtattttgacaatcagctgcttcccatcttgcatcgtcgcgaggaatactttgttaaagttcccctctggtagccttgacaaattcagacagactgcatcttgacctgcagcttcttcggcgatgtcgatgagtgcatttacgtcggattggatgtatctgcgtcgtaattgctctgattcgttccataaccatctctgagcgaaataactgtaataaggctccaggtcggaacctatcacttggtgagtcggagataatgtaataaacaaagcaacctaccagatttggctcttcatctgctgggcgacatggtgaattttcgagtgatgtgatgcatgggtaatttcagggggttgaatctaatccgagagttcttacaagcttgaaaaatcattttgggacgacgcagtatggcgataatatgtgagtgaagttgggttggtttgccagggggattctgctcgtacatgacggagcgaaaaaggaaacaattgaggttggctgatatttgtggcagcctgcagatggcatggtctaaacacataagtcgtattaatggagtgaaattgagaataccgaggtatctctcaagaaaggccaattccgaccccattgctcgagacagccaagtacaatcgaatatagcgtggtaattccgaaatggccaaagaatacaagatcaacgacaccaagtattcaacttcattatctatatccttctcagggccacacctaacaataatcctgtacaatccaaataccagctataaactcaaccacttagacgtactcccaagcaaccggggtgctagtgttgacagagacagccagagcatcgaagccgaggcagtcaccaaccttgccagtggggacagtagcgttctgcagagcagcaaaaacctgccacttaggggcagcagcgccccggcgggaacggcgggagctggtggtactgttggtggtaccgttggcagtagggcaagccatgaagccagatgcacccaggccattgaaggtccagtggccgaaagaggcaccgggagtgtagacgaagggaccatcagaggaaccaacgggctcgtaggcagagtggggagatgtgaagcgcagagcacccttgttatcaacgtagatagcctggccaccggggacctcgacatcctggatatgaagttagcaaatggagcattggaaatatacatgtatcagtatttctaaccaagtagtgtccgttggcaatcacggtctggttggtgttgggaattccggggacgggagaataggtgtaggcgttgccaccgagccagaagtagctgccggcggcattgaggggcagcaggtggacgggagaagccgagcgggcagagatgacgctgaaggcagcatcggagctgttggcctgcttagagccggggatggcagccaccagaggggcgagggcgagaatagcagagaacttcatcttgagggataggggaagtgattgatactgaggatgagagaattatcaatgaagagagatattcaggggatctgtcagggtcatatataaggtacgctcggaaaggaacgtgcttaggcaactccataagcggacccagctgagaaatcttgtgatcgacattgaatccggtggagccgagttgaagagaaagagggaaatgtcttacctagacgatacaacataatcctgttcgatatatatagagatgggagtatgtatagggagcctggaaggcccaagatgggaggaaaccctaattaggtaggagtgacaacaaacaggtcacatacatcagcagtatatctctacccaccgtctacttggactattgagaggggcttcaacacggtggagatcgactaactggaccacaaatgtaggtattccccttcacggtgtcaattgacgcaaaagtagacaccccaattgatccaaaacacatgctgttggaccctgaagatcccaatagaagagccggaaaaagctgtttcagagaactcatgaaagttcgacagtgattaaagatcgaccggaggtccgacagactttgcccctaagaaaaaagaagagaacggcaacctcttagctgcgccatatggggatccacgatatccacattgtctcagggcacatcgtctttgccatcatcattggctgtgtcgtcaactggcgtgatatcggttatctatcgtgagtggctgtattgctattttaatttagaagttctcgaatgtctcgaatgtgtcgactgaataactatatcatacctcggttgatagcattgccaccgtccgatgtatatattgtctcacataaatggattgatgatgtggaataatcaggatataacagccctaccagcgtagccaaccccccaaagtacatactccgtagtagattgtttattgtaggaaaaggcttacaataagtgggataattccacaaacttcctcgtacaccccacgatgtttttgataaaaggggcatttaatatgatgtcagtgatatgatgtcaggtgacccacccttttctccgtgacgcgatggaaatagaacaacaatcaaccaaacttgtgcttaatcattttcagaaggtctacaagatcatgggcatcgaagagtgaatggcttccccacgtgccaaggccggagcttcgcgctcggtcaaattctccccttccacgcgtcgcggctatacgtcactcccgaattcaacagtcgaacactcaatctcacagagcaatttgggacaaaatgacgacctggacactccttcaagtggggatgagtccatcgagcaggccaatataaaactcctacctttgaaacaaggtagagctcgagattcacggctctcgagccccaaaacaaatgaaccgaaccccactatcaatgtccccgacgacgagcgtgatgcatcagagcgaataaaagagattctcgaggcgaatggcaccattccattgaactcattctcgacagatttggaggaaggacattcggacagagactctctggttctcagtgatcgatatagtgacgactatggtatcccgtctgacaagggcctgcttttgaacgatataaagcgtgaagatgtgggaaagggctctgactggaggtcattgttccgtctgacttcctggtggaacgttctcggcttgttgataatcgccctactggtagtatggttttcgctcaggggactgggctggtcttctgtcggagctgccattggtgaatttgtaggtctttcttccttttcgtctggtcatttgaagacaagaaatcagcctctaacaatcacagcaagcggtcccctggtaccctactcccctcggcggaacgagcgaacaatggaaggagagctatgccaaagctcagaaaatggtcagagaaatgagcctcgccgaaaaagtgaacgttacaactggaacaggctggcaaatgggactctgtgttggcaatacgggtaggcccttgatatccgttcgctaccatggctatgcaaactctaacgcgaactgggttgtctagcacctgccgaactcgtcaaatttccctccctttgcctacaagacggtcctctcggactcagatttgcgcacaacattacagctttccccgcagggatcaccacgggtgcgacatggaaccgcgagctcatgcaaatgcgtggctttgctctgggaaaggaggcgcggctgaaaggcgtgaatataattctcggtccatctatgggaccgattggtatgatgcctgccggtggtcgtaactgggaggcattcggttcagatccagttttgcaaggcgtggctgcggcggagaccatccgcggtatccagcggaacggggtcatggccacggcgaaacacttcattggaaatgaacaagaacacttccgtcagtcatttgagtggggtactccaactgcgctctcatcgaatatcgatgatcgcgcattacacgaagtctttgcctggcccttcgctgagagtgtgcgtgcggatgtggcgagcgtcatgtgctcctaccaaatggtcaacaacagctatgcttgcgaaaatagtaaactcatcaacggtcttctgaaagatgagctcggattccagggattcgtgcagtcggactggctggctcagcgttcaggcgtgcacagcgctattggaggcctggatatgagcatgcccggtgatggccttcattgggccgacggtgtcgcgctctggggaagtgaactgactcgcgcagcgttgaacacgtctgttcccattgagcgcctgaatgatatggtcactcgcatcgtggccgcctggtaccatctcagacaggactcatgggaaccccctgcacctgagggcgacggcgggccgaacttctcgtcctggactcaggagcgaatcgggcacttgcatgaaggctcaccggataatgatgcgacgggtgtggtcaacaaatttgtcgacgcacagggaacaggcgaggacgctcattctgttgttgctcgtcatgtcgctgccgaaggcaccgtgcttctgaaaaatattaataatacccttccactcttgcgggcacagtccgcaaccaatggcaaataccgggtcggtgtatacggcgaagacgctggtcctggccaaggaccgaatgcttgtgctgacagaggatgtaaccaagggaccttgggctctggttggggtagtggggctgtggaattcccatacttgatcagtccatgggaagcactgcaacatgcgtggtcgaatgactctgtcgatgtcaaagcttatttgacgaataatgttgcacctcaggacctcgcaaagcaggacctctgtttggtctttgccaacgcagacggaggagaagggttcatccgcagtgacggcattgatgctgatcgaaaggatctctttctacaaaagaacggcactcagttggtagagggggtggccaagcactgcggcggtggccaaggtaaaaccgtcgttatagtacactccattggccccgttgtgatggagtcttggattgaccttcccggtgtccacgctgtactgtatgccaacctacctgggcaagaaagcgggaatgcgttgatggacgttctatttggagacgtcgacgccagtgggcgtctgccatacaccatcggacgaagcctagaggactacggtccaggcgcacaagttctgtatgagcatgcagacccatccgttccacaggtcgacctcagccagggcctgtatatcgattaccggtatttcgacaagttcaacatcactccccggttcgaattcggcttcggtctgtcatacacaaccttcgactactctgcactgagcatcgagaagctgcagaagaagtcccaatggccttccaaacggcccacaaacgaagtcgaacctcccacatacgacaaaaaacaggaggacgccagcagcattttattcccgccaggtttccgtgtactccggaaatacatctacccctacctcaccagcctagaaggaaccgaacccggtccatacccataccccgaaggatacaacaaacaccaaaatccatccgccgcaggcggcggaccgggcgggaatccatctctctacgagcccatcctcgagctcaccgtcgaggtgacaaacaccggcacgcgcccgggacaggatgtggtccaggtgtatgtttctttccccgaagatgtcgccgagcaccgtggactaggatggtcccgtgagtcaattgagttccctgaacgtgtcctgcggaatttttcgaaaatcctcctgcaaccgggtgagactagaaatgtcaagatgacgttgactcggaaggatctcagctattggagtgttcgtgcacagaactgggtgttgcctactgaagggaaattccgcatctgggctgggcgtagttctagagatttaccgctcgtggttgagttttgatccaggacttggaatactgttataattataaaattgactcgatctaatttcccaaatgtgtctacgtggctacaagaagccgaacttgaaataaacggaccatagtatatgtctatcgtactgaacagggccatgaaaagccagagcgaaacaaaatcaaataacgtataaacttttgctttgacatggtagatgcactgagttaggtatctatccgaaacatgtacatactggcggaaatggcaataacaaaatctatgccggtaaaaaaagaaaagagaacagaacgcagaacgccgaaacaccgtctatgagatccaatgcagaccaaaacattatcatggtgctcatgatgcgaggacatctcagcgattacgaatcataatgttaaagcacgtagaagcacgtctattcgtcgtcggagtcctcgggcttgggagtacccttgggggagttcaactagaaaatgggttagcatactgtggaagaaaagaaatcaacatgaataaggaaactcacccattcgatgtagcgcagacgacgacggatctcacgctccttctgctgagcacgggtcatcttcttcttcttcttagcgcggaacttgaggtcgccttcatcgccagagttgacggcagatggggcggcggatggggcggcactggtaacggcggagccagtggcgggggttccagggccggaaggcgagttggcggcactgtcctcgaagcggtcgaggctgacggcgttgttggtgcggctgacaacgcgaccgtcggcgatgtgcagttgctcggggcagagagcgcccacaaactcttcgttgtgagaaatcataacgacaccacccttgaagtcacggatggcaacggctagaccaccgagcgagtcacgatccaagaagttagtcggctcgtccaggaccagcaaatgggggttgttccacatggcaccggcaagcacgaccttgaccttctgaccaccggaaagaccggagatctcgttgtggttggcgatctcggggtccataccaatgtcctcgaagtgcttggtgatggtcttggggtccagaacacggaagcccagaccttcacgggaagcctcgtgatcgtcgaactcctgaatcaacttgaagaaaccaagctcgagcagggtctcacgcgagatcatggtgttgtacttggggagaaggccaacccacttgacctcatattggaaggacttcttccacttctgacgaccaatcaaggtttcgatgcgacgggcaccgcggccgtcacccaggtcaactggcttctccagctggatcttgtcctcttcggtaagaatacgggtctgcttcatgaacacttcacgatcgtcaccgttggcgtaacgccactggaggtactggctgggagtcttctccaaatgcatctcaacgtgctccagagcgtgctgcttgatgtaaccgatacgcaagttggggtgcttctccacctttccgccttgaggaatggtctcaccagtcagaatcttgatgaaagtagacttgccggcaccgtttccaccaatgatagcgacacgggaggagagggtaagggacagcgaggcatcgtggagcgaggggcgggcagcgccagggtaggtgtatgagacgttgctcatgcgcataatggcacgagttgcggacttgataccagacaagatgcctgggggagggaacttgaactgcacattggatgcggacagagtgtagtaactcttgccctcgggcttctgcttgacgaattcggcaaggttacccttgtagcagacgagcttcttgccctcgtagtggtagatatccgtgcagacagcatcgaggaagccggagtcgtgactgacgatcaaactggtgatctcggtgtgcgatttgaggtactcctggagccacttgacgtttgccacatccaagtgattagtaggttcgtcgagcaagagcacatcagccttctggagcatagcacgggccaaagccaacttcatcttccaaccaccggacagagagcccacgggctgggactggcggccctcggggccatcggtgaatccgaactcgaggagaacctcgcgaatgtggtccataccctgggaaacaatcttggggtccttggcaacatactcaaggatggtcaggttggcatcttcaccctggttgtgctccacgaagcaagtgcgaacctcatcctggggcgggaagccttccaacttctcgttggcgatactgcgcatcagagtagactttccggcaccgttgcgaccgcaaagaccgtatcggtggcccttgaggagacgcaggttggtgtgggacagcaggagcatacctccgtaagcaagagagaagttggcgttgacaatctcaacatcgttggggtcatctgggatgggcttgccgaacttgatctcatcctctgcgatgtagtgggcttgaacagcagcggcgacagcctccgcgttaccatccgcaagcagaccgcgcaggtatgggctaatgcggtcggagatacggtcgtgcatgcggcagttgacatcttcgcggaccatgccggcaatgaagttcttggccagatcctgcagcttggagtctaaaccaaccagaccaccatgctcctgaatcttggcattcagcacgaccaggacctcctcgggggtgatcttggagatggaaccagaggcaagatggttgtctcccatggcagtctcgataacgtcgagagcacgggtggcgagctcgcgaacctcgggcagggaggcagtctccttgaccgacttcacaccaggctggagcttggggaggaaagtacgggcctcagcgggatcgtggaccagcttggtcagattctccacaacgaccacggtctggcgaagggtttcttggggagtagcaggggtattgagggatcgagcgagcagaggagtcaacatggccaacacgggagatgtgacgatggcgacgaaggtggtctgagacaaagcgtggatggccttttgaagagtctgggcggaggggttctccatggtcttgatcagaaggggaatacggggggcgacatcgtcgttcgacaggagggtggtgagagcagtcatggtcttgcaagactgcttggtcacttcactcttcaggtcgtgcatgccggactcgacaatggggatgagctccttcagggtcttgcccatagcctcacgcagcaagtccttctggcgctcctcgtccttggtacccttgcccaactgcgccttgacggccatcttttcgatcagcgagtaggcacccacaaagccttgccacttgccagatcccttggccaggtagcgctcgagagcggggatcagaccgttgaccatggcctcggggctgagacagccgaagagggcatcaatggcgtactgggcagcatcacggacgacggcacccttgtcagaaagggcatccagagcaaggtcgaagacgcctccgtcgtgcaagaggaaaacggcttcactgagaggaaattctcgggggaagcgctcgaacaaagcaccgatgatgagcatggcacattcgcgcttggtaggattcttcttatcggaagcagccttgcgaacatcggcgagaacattgtagttcagcaggccggctgtgccggcgccctgaataagcaggttggtcaaggcatatgcgccatccaaagacttctgggaggtgtcggaagtgaagatggtgttgaggactgaggaaatctcctcggaggtggggggcacgccggaggggccctttgcaacgacagtcggcatggcgggagtctcagatggtgagacagtatgcggcattttccagagaaacagaaagtcgaagatcgagtgtcggtatcaaagaaagataccgaaaaaaaaaaaaaaaattgaagcccttgggtagagaggggcaattcgaccttacggaagataagactgttcacagcgcaactcacgcacacaaacagaggagtaggatcgggttgaatcgtagagtatgtacacacgattctgaagaaaccctgaagacccgaaacacaacgaaaaaagaaacacaaagaggggagagtggtctaaagaagtaaaaacaatcttcgccatcgccgattgctgacccacgggcgaccgaaatttttttttgcttactcatccaatcagcgggtccggcggtgccatgggacaaaaggcgcctaaccggatttgtctgattgggtcagtgacatgtctgccttggtgcctggaactcctgatgccttactgcctgaatatcgttctgccttgttgccttattcctgaaattgagctatgcctgaggcgttacgtcacagcaatcagaagtaccaacgtgaaccgacgcttctgacggataaatggatgttctttttcactctggcgagccccgaggctcatctcgtaaggatattggcggcattgggttcgactcggtccgaggccagccttctccaagtatgtcagtagctatcgtatacaatgcatgtcaatgaaagatatcacgatttataccactactctgtagactatccaggtagactgaattacgaaatagccctgtgttcactgagatgcgtcatatccgtccatttcatcatccccaacgttagcacagccgatatggccgcatgaccccgggcctcggtagacacaaccccttgttccccgcgtccaaccggtctgcattcggtcaaggcgatctctgagttcggctgtttatttctcctctttttgtacatttatcctcgtcaatcccccgagtttgacttcaattgctgtttctccctattcccgcaattcatctccgcccccgcaaatccacccccggaccccatcaccacaccacacaaaatggctctcagctggagatcaacccggcatgtttcaaggcttgcacaggtgagtttggatgataatgattacttgtaattagacatttcgggctcgctaacttttcttttaagtcagcacgacctgtcctctcggcacgtcactatgcgaccgccgagcccgacctgaagactaccttgaaggaggtcatcccggctaagcgggagcttctcaagcaggtcaaggcacagagtgaggaagtcatcggcgaggtaaagttcgcaaatgtcattggtggtatgcgtggtcttaaagccatcctctgggagggctccgtccttgacgctgatgagggaatccgcttccacggcaagacaatcaaagactgccagaaggaacttcccaagggtacaactggcacagaaatgctacccgaggctatgttctggctgttgctcacgggccaggtgccctccaccggacaggttcgtgccttctcgcgcgagctcgccgagaagtccgaactcccctcatatatcctagacctgatcaagactttcccctcctcaatgcaccctatgacccagctgtcaattgctgtggcagccctcaataacgaatccaagttcgccaaggcctacgcggatggcatcaataaggccgactactgggagcctacctttgacgacagcatctcccttcttgctaagattcctcgcgtggccgccattatcttccgtcccaatgacatcgatgccgttggtacccagaagcttgacgttactcaggattgggcacacaatttcgcagagctgctgggcaagggtggctcagaccatgctgacttccacgacctactccgtctttatcttgctctgcacggtgaccacgaaggtggtaacgtgtcagcccacgcgactcacctcgttggaagcgccctgagcgatcctttcctgagctacagtgctggtctcttgggcctggctggcccactccacggcctggcagcccaagaagttctccgctgggtaactgccatgcaggataagatcggaaccaagttcacagatgaggatgtccgcaactatctctgggatactctcaagtcgggacgtgtggtccctggatatggtcacggagttctgcgcaagcccgaccctcgtttccaggctctgatggacttcgccgccacccgccctgatgttctcgccaacccggtattccagttggttaagaagaactcggagatcgctccgggtgtgctcactgagcacggaaaggtatgtccaacagcagacatcatcaaaatatctttctcagctaatgatttttacttttctacagaccaagaacccataccccaacgtcgatgccgccagcggtgtccttttccaccactttggtttccaacagcccctatactacaccgtcgctttcggtgtcagccgtgccctcggccctctatcccagctgatctgggatcgcgttcttggcatgcccattgagcgccctaagagcatcaacctctcgggcctgctcagcaagaaataaataccaatatgttgcctggtgcgacctaaaactccttggcctcgacggttcaaatgatgaatgtgaagcgagctttcctgatttttcattttcgttcggtcgctttcgttttctcttatgtatttcatccgactagacagaattacctctatagaatgcttgtttttctgatcaattggatctcaattttgagcaaaagaagtacttgagattatggagagtaatgtaaaccggatgggaagatcgtcatgaagataatgtaagacatgcaaggcagccgtttgtgattgactttcgagagatggccatattccctgtagccttggaccagtctccacagactgtgtgttggcggtcgtaaggagctcggcctgcatatggatcggaagaagaccgagagccgaggagtatcaagttgcaatttaggaaactcgcttgattgaataaacaatgtcaatataacgaacagaatgctgatatatgcattatctccatgtctagctaagataaaatagaactggtcgtcttaaaaacgcaaagcaaatatgtaatcctatccagaatctgcatctgcctcggctcacaaacgaatactcccagtcgacaattgctcccactctctctgtccatacggcgaatagctcttatcaccaggtgcaatccacaagaagtggtcatccttaccctcgggggctttagttccaagcaaagcaataccaacactctcatcccgaagcggtaccttgttctgcttatgattgtggatgtgcgtgggattctcgacgatgcgaaggaacaacggaatagcatatttaggcagcttggagcgtacgaatctcggaagcgctgtgttgtcaaatgtcagtcgggcgtccgggctaatctgaatagctgcacacccagcccgtccttcgtaattgggaagacggacgccgtagacgttcgcctcggtaataccagggaagtggcctaggacctctgaaacttccgcggttgctctagtccatgaatgctttgattagctttgcttgtattccctcaggtgatttcaactcacacgttctcgctcttccagcggaaggtatccccaagtcggtcgaggaagtaccaacggccatcactctgccgacgcagagcatctccagatcgataatagagatccccttcttgaaggcgtcgcgcaggaatttcttattggtcgcctcgtcattgcgccagtacccctggaaagccttttcaccaggaacattgacgataatctcaccccctgctcataaggcgcgcgaagcgcaaagccagtattagaatcgcgcagaatatccccagtctctgggtcaatagcaacaggaacgaagacattatacagtataccccgcatgatcaaaccgtggtgaccaaaaattccagacgtgaaaggaccgcttaaagaactccccgacttcagcgactctaaaccgctcccggatatccggccgcagaccgttgccgtacatacagcggaccttgtggtttcggtcctggggtgatgggggcggcacgagcaggtaatgcgctgtctctctgacatagatgaaaatagtcgactccaagtcgcgggcatcggtccagaatctactcacgctgaacttgggtgcgatggcgacgctcacgcccattactagacatgcgattacggcgacggctgctgtgctgtggtacaaaggcatgcagctgtatcagcgatcgccgtctgggccgggcgtgtctcccatcagggcacgtcggatgaagagagtggtatatagtctggacattgtgaacgcacagcccttgggcatacccgtggtgccggaggtgtgtaggaggatcgctgggaagtcgctggtcacatgtttgctcagttccttgggtgggagggttattgggaaagtgttgatatgcgcctttagcgagctgtccagggtcatcgacttcattcccagattgtgtgtaatagcgtcgttgctttcatcgacgcgggcacgacagtcggcatcttcgtcgacgagcagaatattcgcgccactgatcttcagacagtgcagcaatgcgtcgccagtgagattgtaattgatcgcggccggggcacagccaatgctccagaggccgatccatgcgaaaatgtactcgttgctgttctggaggtaaagggcaacgaggtcacctttcttcacgccctgtgataagaagaaatgggcgtattggcaggcttggtcttggatttctcggtaggtgtatggtctctcgcgagtccagacacagtccatgccggggtattacttcacagtctgcagtaggacgaaccatggatttccttggttttgacgaactaaagctgatcagtatggtttacaattgtcggatagtatgtgaacataccggcattggcatattgtcgttcagcgtgcttcatcgtgaccaaatttgatacatccttctgaatatgaaatttggcattcagatatcctgcgactgtggctcctcccacgagagcagcggtggtacaacatgagcatagcattatgatagaccatctcgtaccactcgatggtcaaaattcttgctcttcccagacctcctcagcaatcatcctcaacatagcgccgctaaggctgatgtcagtttcttttgggatgctcggcgggcgaagaaagagcttttcgaagctgataataagcggctggcccctgaggcagacacgattgttctcgcctttgctgattgtaacgatttgctgacgtttgaccatatcgttcacaagttcccataactctagcacgatgttgggcgagctccgactgatcttaattgtaatgaccatttgaacatcgccgttggattgggaaaaccagaaccgagcatctgacatcaatttgctgggcgactctgaaaagcccgtttctatgacaagcgagggccatttcttcgtccgagctcgaggaagtctttttggtaaaaattgacagtctggctgtttagcagagccattctctgctttgcaagtagcggctccaaagcttcgaagactataatcgagttccattggcttgaggcaatcaaagaagagcctttcaaataagtgtgccgtaacttcatgagcgcgtgagactgccattttgacaaggagaaggtgttgggaagagtcgtaagaattccagcaacgctgaaggatactatcgtccgagtttaggaagtcgcgactgaaggcctgcttattaaccttggtgaagagcacccattcactggcctcaaattcctcttgttggcgatttagttccatctttacagtttctagaaattgtttagttcccttgtacggataccttctgatcgggggtcctagatcaccgagaaagctgctgctagagctctcggtgtctagctcaaactttgtgttcgaggacatgatagccgcaataataccgtcccgtgttagtgtgaaagaagaaacattcccatattgactgtaggcattaagaatcgtccccgaggaccacctgacgctaatgtgacgtagccttattacgaccttcagcgcaatagacatatacgtgcagggccaatagaactattcttccccaaagttagcggttagtcttagtcttggagaatgaagtttaaagaggctgaatatagacatgatatggaaaagatcttgagaaaaaaaagtcccaggatggcattccgattgccgataattgtccgaattggtgacttgctcacgatttactgatcacagggatatcatgctactgaaaatatcgagattatgccggaatatattcaaacagattataatatctcagtagacatatctgatctggccttgggccaaccgccggttcatccacccgtaatacagtctcaaagaaacacatacggaacaagcaagcagcaggagcgctgcgttggtccagtggccagtagggaagcctttcttggcttgattggacttgtagatccagacacctacgatttgaccaggcgctccgaaggaaatattcatcgcaatggccaaaccaattccagccgttgagcggagattggaagacagccagcccagaagaggaggaatgcatgagaatgcacccgaggtagcgacaatcaagcatccatagcggtgctggtgagctgatgttaacatatattcgtttacagtgttgtgcgtagatcagaaattgctcaccagataagcgtctgcaggaaggacagcggaagctaagaaacccatagcaccaataaatgagaagatagcagaatgcataccgcgactgtatcttgattagcgatgccaattgattgggggcctgaagagggggaacgaacgcattgaagtagtctgcagaccaggagaccgcaagagttactacatatgcaacggcttatggaggaaccgtcatcaactgagcctgtagattttcataacccaaaccggcggtgatggttggtgtgaaaagtgacagactagaaaatggcacggaaatggaaaagtatacctaaaaatatcagtcaacgaatgaatccaacggtttcccccgaagacaccttatacataccagataatgggcataaagtcgccattctgtcaacactgccttggcttcactccaggtcattgctttggccgcaccctggcctccttccacggcgagtcgctgtttagccagtgccttgtcctccgcagttaagaaaccacaagtctctgggtaatctggaagaaagaaccaaacaaggattgcagatgcgcacgaaggcgcgccttcaatgataaagagccatctccaggcggaaagaccccttacaccattcatatgcccgactccgtatgcaatggctcctccaaacgcgcctgccaaggtggcagaagccaagataaacgcgactctcaatgatcgttccgacactttataccaaaatgtgaggtaaaatactagtccagggaataggccagcttcaagcaccccgaggagaaaacgaactcctgcgacttgtgcgaaattctgggcacctccaaggcccatggtgactgcgccccaggagaacatgaggaacgcaatccagcgctataatttgcaattagcttaagttggtaaaccacatgggacggttactaacacttggtttcaatttcttgaggaaatagttggaagggacttcaaagagaccgtaggcgatcaagaacaccattagagcgatgctagtttaagtcagaagtgccgcgaagtatgggaagtcgcattgcctcacatgtattggtggtctgtcatattcgtttcgtcgagcaaatcattgcctgtgcctgagttgagagtcttcgcattgcctgttttgatcgacttgtcagtactggcgctggctaattggcatactgaatccaaacataccaacattggaacggtcaaggtaacaaagtagataaattccagcgcataggggtagaattcgaagatcttgcttgcgaatgagggacttttcttgctcgaagtcgacctcgatcgccggggaaggacttccattctacagttatgattagttaagatacagatatcaggggtaaggatgtagtgtataccttcatccctatctccacatcttccaccatatctgctggactcttgtggttctgcattaggggtatcgaggttagggacggagaagtgcagcaatctggggtagctaaaatccggggaaagcagtttcaagatatacacaattccccaaccgtgccccatagtttaatttttcggggtaggaggccgtctccgatggctaaacggctaattgtggccaactacggtagcctaaacgggccacatttgaaaccctcggtgatacttactgtcttcaccgctggagtttccgcctttgtaatataccgcttaatacagtccgcgtattttgaaacttagacactgaacacccacgttaagcgtcacatccagtgcagcgtcacatccagtgcagcgtcacatccagtgcagcgtcacatccagtgcggcgtgccaacagttttcccttcctgcctccgcagtagttggtggaagctcgatcaacaacgtcgatgactccaaggctccatccgcatctacgtcttacattctgagggctgtgctgccggtgtagcgaactaagcctagtaggccaacatggttctggctgggggtttcgaactcctactcactactactaattctcccccaaaatctgttcacttcaactaatgcagacttacaaggcttcattatgacttatgttatgtaaaggcacagtctggaagcaattgaatatgaccagtggattccaacatatgattacctacggagtagtaaaagtacttctatccatggatccatggatgcttaagggtacgttagtcagcccacgaatttcagaagattaatccgcgagacatgtgggattatcctcctattggttgatgcttatctggtttgattacattgctggtttactacaactgcccggaatggacatgaaccagttcccagatgtcgcaccagatcagcgggatctcatccaatatttcacctgccaagcatcggttatgatttcgtgtcacccacagatgcagcatgaagcctgcaatgtgttaatgcctttgtcatccgcaagtaacgctctgctttattctctgttggccttcgctgctggtcaccaagcctctcgtaccacagacgaagtcgaaaaacgacatttccgacgccagatgattcaactcgaaaccaaaagtgtacgtgatcttcaaggggagatttctcttcagcttcggtcaggtcttccccttatggcatctagtttgatactatgtctgtgctctctttgccatgagggtgacgactatatatcttggagagcccacctccgaggcgtaaaggcggccttttctattataagcgctacagaatttgcaggaaaagaatctcaaatcgaatacctgacaaagcgctatcagttgctagaagctattgcaatgcttacagctaaaggatttgaggcgctagagccgaaggacgaccagtaactatcctctcaagcctttttggacgatcatgtggcttgttacaatgaagtcctggatatgtttcgccatattggagctgtagctttcgaccgacgcaagcttgatgttacaccgcaaaactcgattttgtccccaagtgattttgaattggaaggccaaagtatggagtctgctttgcttcgaatgatacacagagacaataatttaccgcccagatttcttccaagggtacaagagatgcttaacgccggccaagtcggggaattcaccatctgcaaccaaatttacgaatacacggctcttcttcatgtgttgacgcagacacggggatgttttcgtttggtcttgggagttccgagactgtgacaaatcttatcagattatcttatagggcgtggaaatggaggacatagcccggggcactcgacttgcagtatttgtttgttgactcgcaagagttaattttcccgagatactcatccggatttttcttggtgaagtttttgacagcaaatcggctgaccatcatgatctcgtctcccaatccattgcgggtactatgatgtattagccacaggaatgtggaatagaaaatagaaaaaattgggcgaccataccatctttgattcttcgtagctttggatttccaagttattatagaactcttcagttccaaattccttgcgccatttcacaaaggctgcgtgtcacctaaaaatcattgagctgtaaggaaaaaccccttataactcaccgttgttgagatataagattgtaaaataaggcatttgctatggtgttatgggtggcccactcgcttgtgaaatatgtcggaggaaaaaacaccgcatgttaccactagaccaaaaaggtgcacaccttacttaggaaggataactggtgtaactagttatttctcgttctgacaaaatacgttaataggtcaggtgatcttctagttagatctaggtattctgccacctagtaccatatagatcccacggtactaacattaagattccagaactcaagccggctaggtctagatcaggattgagatgatcgtggctgtggggcttggcatggagttaagtaccgtttgccgaagatgctgacagcggagatgcttggcaaagtgtctcaatgattcgaaatgggatccctaggtaaccctggactgttctcacataacattgtgcaatattacaatttgaatgccaaataatcaagcatttcctaatccataggctttcatttatttgcctggcctcagatcactgcttctgttttcattccaagacaattcattagcgtccggacaagcccagctactttggtctgtcaaattgaacgagattctcgactaatcgacactttgcgacagacccacagatcgtcatcatccgaagggttcagcttatcttgacgttttctagaacccaaagaaagatctccattgtgactgaggaaggcagcaacaatccacgatgacctagtattgatgcaggtggctgacaggccaagatctccacagcggattgtgttcatcataccacagagtcgaactcacgataaatcctacactaggcttacaaatgcacactttgaaaggtcagcgtgcaaatttcgttctcgtttagatcagatcccaggcagccaaatatcggtcatccatgggtcttatgtgggtcttattctagccacgcgtccatgtattcgctttcttcatacttggcaaaggtcttttgcttagttctggggtgctgacacaggctcggttgaaatgctttggtcaattgatactcgttaggtatgggtctttgcttattatatcttggccacagcagagacaccacaggtgatgagatacctggcggtggggctggagattcgtacatgtcgacgttaattctatataatcctacatattactgcttacagggagattgattatactttggacaataagacgaagtataatatctaggatgaagaagccgaccttgtccttcacttttctggccttgcatgcatggtttgtgtcgatattggctgttggatgtaagtatacgatgtttctcaagtgtaagctgaacatatgtctgactgtttcttacaggtgatccagtgtcagttcattttatcgaccccgtcctctctcccttgaatgccacgaagaagttcagtatcacagctgggattgagacatgcaaccaaaccatcaacttcattctagaaaacaacgatgatctcttatcacaagacgtgcagattcggtatcctgggctccatgaccaagctaacgagacaggtgcgctttcgggggctcacgttcggtttacaaaaggaacagtgtggatgcaggacccctatagtcgaagtcaggataacgtcggatgggcacggcttaccgtgatccaggaaggagatagcctgctcttcgatggagcattcacaatgatgggctcgcaatacgccatagagtttgagatgctcgatgatggatctactgcgatcgtagcccacgaacaggaatcgacactctctccgatctgctcaacttcacccgagacacacttgtgtaaacgacagagctgggatccttggagcaacgaggatctcacatcaacgatcggcagtacttacggttgtccaaatacgcgaaagattgccaacgttggcattatgacggattgcacttacactgcaggcttcaactcctccgattctgcctatcgctatatcttgaatatggtcaacactgcctctgtggtgtttgagaacagtttcaatatctctcttgctatacaaaatttgacaattagtgactctgaatgcccggacaatacctctggtacgactgcatggaatgtaccatgctctcggggagatctcaacacgcgccttcaagacttttcaacatggagaagctccgtggatgatgaaaatgcatactggaccttgttgactgggtgttcgggttctgctggagaggttggcgtgtcatgggttgcagcactgtgcaacacgggatctgggtctggtgatagtggagctaccaatgtcgttgcccgaacgcagaacgagtggcaggtctttgcgtaagccacaataccagttagccataaggtggtgaaattttagctgacaggatcagtcacgagtcggcgcatacattcggagcagtccacgactgcgattcgagcacctgtggaagtgactcgacacagtgctgccccctctcgtcgaatacctgtgatgctgatggacagtacctcatgagccccgtatctgaatctggcattacgcgcttttcgccctgcacaatcggaaacgtctgttcaaggcttggctctgggcaagttgatggacgctgcttggtggactcttataccggcaatacaactggtactaacgagcaatgcggcaacggtatcgtcgaaaccggcgagacatgcgactgtggaaatggtgcctgtagcgaacaagagtctcgctgctgcgactctgtgacatgccagttgcgatcaggagatggatgtgatcagacaaataatggcggttctggtaatactgccaacactgataacaatggcaacactgggggcaggatctcgggaaatggccaaccaagtaacgatgtatcatcctgggttcaaaatcatcttccgttggttattgggctttctgctggtattggtggggctttattgctgcttatacttggatgcttgattttttcctgtaggcgcagccgcaggcgaccagtggtgaataacaagcctgttgcaatgcctccacctcaatattcttagaaatgaattgttgtcaataacagaggtcatagccgtgatataatctttcggagcaagcttagcaagagatgaaattctgatcatatatatttccagcttttaggaacttaatttttggtaatttttgaaatgatatgaacaactctataacgagagatcagcgatggctacctttagctgtctgtttcacccacaataacgggccgcctggaaaccaatatgtaccggacgacatcataattagatacaaaattggtagatcgtaactatgatttatatggcccacgttattgctgatgggttctttcctccgcgttttgatccatcattagggcaacggaaacgcacgactagtcggtaagcgagtcgccatcctccccgaaacgcgtccatgaattagcacttggtcaattcaaccacccatcatgccaccaattcactcccaaaccccaagaaattcagctgagcaggagggtaggatcttactggctgtctgggctatttaaaaacacgaaatagctacgatcacccttggtgctcgcatatttgatgtgcctcgatccactttactacgatggctctcgtgataaatagggatccgcaagataggccatctaaacctgaccataaaagcctagcagagctcttaattggcatgaatttgatgctgaccatgagggcaggacttgatggctttcagcatagaaggtcagcatgccgcagcgagaagtaaggactaaacttaccgcaatactattgaacatcggcacgacatacatgaggcatttaccatcgggaagccttattcggttgatatacttgcctatgggaacgattttctctatcaccaaggatacatctgcgccctcttcgatcataggtgtgacagctcaactcgccggttgtgtgggatattcgtcaggatatcaaacaacttcttcttcttcattatcaatcaacacggaatcaaagcatgatggtagcacctcagaacatggaaagacactggctaagaatatcatcgggtaagtgcaaatcagtatcttctatacctacagtttccttctatccatactgaccacatcagcagactccataaaccaagacttccttgcatattgagatggaaatgactttacactggtaaatttataacttcgtcttcagaaaaaaccatttccttcgccaaagttgaaccgtacctctgtagccccatataaatcggaccaaggagtagtacaattaatccctgcgtgacaaaacaccaagtatagcctggaatatttgtgagccaacgaatgcatgcaatgtgatagtgggatatatttaccgacggcttcaacccaataattaatgaaccatggctcgacaaaggcagaaaactgtcgctgttagtactggagtgctccttgtcacagattgcaaattaacatacgttcaatacgacggcgtagaatgtcataatctcggtaatatgttccgggtagcaatcgaaaatgtaggtcgagacggcgcaatttccaatttgcattccagcagagactaagtaaagtaaatatcagtcatcgtttcaatacacattgtccgctatattctcacatagaaagaaagcgacttggcctgtgatccagtgccattggcgatcgattgaaaggccccaaataattgttcctaccgatgcaaggaccacacccggatacatcaggtagagtcgcatttcgggagttcggatgttgttatttgctgtcgccaagcgggagcaaatcatgtcgctaagcctaccggaagtcaagagctcggctgcaattgttccaactataagaccagagaaaagaagtccctggatttcaggctgataactggagtatgcggcaggcaccatggtcatgaaggacaagaccctattcaggcgtaagtatggactcaaggtgtctaaatgccatctatcttaccaccagtacaggcagaaaacataaggcaaaacgccgaggaccagcctgggatgcgaccacatcttgcaaaatcttatgattccttgttctgggcggggatgagctacaccgggaatttcgatcgcattctggtttgggttagattatgatgcatgagggaatttgggccctacttacccaaggtttgatcatcttcgttcggttgatatcggcaaatgattgctcatttctgattcggtccaaaatcagatcgcgaggaaacagcgtttctggcaggaaaaagacttccagaattagcaagacgccataggcaattataacatggtaaccagcccagtattggttggctaaagctgtaaagcctccaactagaccgaattgttagcagtatttcacaaagctacgttgtcaagcgccataatcgcgggacatacctaggcagcccatagtacctccgatatcaagtcccataacccagaggccaatcataaacccacgctcgtgctcaaacgaaatgtcgcggatgatacttagcccaccgacaatggacggaccagcaccgatgccctgtataaggcgagtgaccatgtatcctccaagtcctatagatctgattgttgtacaacctgtcgcaagaattgtgagggcgcatgtaccgatgaggatgggccggcgaccccagcgatcacccagggcggagaacaagagcggaccgatcatcaagcctaaggagggaatggcgattgtccaattgaccatagagtaggaagcattgaattgctcttcaagtaaagagaacgatgcgataggtgttccggtcatatacacggatagaaatcccgaataacatgctataaacaaaataaggctcttctgtgatttagaccagttcagtgggtctagggggtctgtcgtcggcgaaggtgataatggaataccgtaagggtcgagctgtagtatatcggtatccagctcatcggtgtgagctggggaagtggaaagacgaggagactttttctgctcatccaagggaggcgcgtccgtcatgtgttgactcattatgagaatgttagagatttatgaacaggcaaagagcagaaaattagagcgatgaacaatcattcatgctgcctcatagtcctaggagatataatggcttttgttttttcgctaattcactgacgtatgttgtacttcgatccaggggcttggatacacgcagtgatacagataagagcttatcttgtacttatttcgctgatatcgttcttgttacgagatgagaacagaaagaatagaacagaatcccatttctcaaatgaagagagactcgatatctttgatcgtctgtatattgtagttgactcgcccaatgtacgttcatctccaatgccttccccttttggattgccaagcataattccacgggatatgattgggtggaacaacagcgcacagaccctatttagtcagcgcttagtgacttcatacaacgttgtagatagcgcatatcgcgcagggacgtatccctctattcatgcatattagcaatttttcagttcaactgcgtgtcggatgtgcttccctttttagtgtggttaggatctgcacttagacctcgacacctagaacagtgggaggacttgatatcctcaaaagcttttgcggccccttctattctcttggattgtagaacattttctaacagcagcatctagaagatgactatcttcacaggttttatagtggaacccatttctttcaatacatttctatacaagtcattgggatgtatctccatgatcatccttatgggttggctactatatcgtctgatgttttcatcgttgagcaagattccagggccatggtataccaatctgagtgttctttttctggtataccatgagtacaggggctcgaaacgactttggattcacaacttgcacttgaaatacggggaatctgtacgcatagctccaaatgaactatctttcgccagcgcgaccgcgataaaagagatttatacatctgcaggtggctacgccaagactgagttatactctctttttcaacatgggcctcacaggaatcttttcacggccctcgataagaaagaagtcggtaaagcacttggagattgagaagaatatatatcgttaactccgctacagcacaacgagaaaaaaaagagactagcggatcggtactcaaactcagcagtccttcagccagggatacaggcgctcctgcgtgatcgagcagacgcatttgccagggtttgcgccgtcaagaaaactttggatgtctatgtatgttcgtgtcagtcttttctcaatttatgtccatagactgatctatcattacagttatatctacattgctacgccctagattgtgtcagtgctattgtttttgatccatatggcacgaggtctatcgaagaaggcaatgacaacgatatggttcgtcatctctcgtatcataacagccgccctggtacgtatatcgtggagattgtaaaatgatccagcacacttattatattaaaggtttggtaatcaggcattatctaccctggttgcatcgcttctacagccgatttgatacacggtctcagaagggtggtgaaatgatcgacgaatatgcttgggcatccattcgaaaagaacctcattcggtcttcaccctttccacacgactactccagtaccctgagatagggacgggaaacatggtggccgaatgcctagatcatatcggtgcgggtattgacacaactggcgacgcactatgtttcctaatgtgggaaatatctcaaccccacaatagcaaaaagatgcaacgcctgtgcgaagagttgcgaatgtacagcctagaaaatggagatacactcatcgacctaccctacctaaatgctatagttcaagagacaatgagactttgggctccaggaacacagtctctgcctcggtacgtgcctgatggtggccgctgcattgacggtcactttgttccaggccatacaattgtcagcgctcagtcatttacagtccaccgaatggaccagacgatctttcccgattcggaagctttcaaccccgagcgctggcttgagatcgaagggaaagttgagaggcaacgtttgatgtttgcgttcggttccggtgccagaacatgtcttggtaaattgtgtgtctttgtgcagtattttaattgatattgatcttgactttttgctaacctactcatagtctcgcaatgtcagaaatgagacttcttctgcatgctgtctattcaagattccgtacccgacctgcggatgacatgaacgcatcgatggaaatgtcggatcagttgatgacatcgcggccaaaggacatgctatgcaaacttacctttgagcccattgagctttgaaagttgtggtttctctttattattactgcttcatccatctgtcatgttatctagataaggttatgcgaataaatttcactggtattgtattgttccatccgcggcgtgctcggattctgcacggcagaaatcgtattgtcaaattgccccattttgccgtacaccggggttgactgcgacatacggcagtctttaaatgccagtgcgagattttgcctgcagtatacatgtattttctagcataagtagtttgtacatctgaatacatcaagtgttaatttaaaggtcgtgtataatcagggtgcaatgaaaagccggcaaccttgtgagccaggcggttaaggttccctaagggactgccgatagagactgccgtactccgtcgggtcttcgcatccgccctccgatactattttccccctttaccccaacagaaaaaaattagagaatatgcaagcgtgcgatagatgtcggaggcgaaaatccggatgtgacaaagtccacccatcctgtggggtatgcagcaaagcgggtgtggcctgtgtatacaccgacagaacgaaagagcctccgatccgacgagatgtaatcgaaaggcttgaacgccgattacgccaaacagaagcgacaaatcgagcattgacagcgagattggccgctttcaattcgacttcaaacaatcagaatactccttctacgactaagagccctcaagcggaagaaagccgacacgaggtctccgatgaagtttcattcttatctctgaatgctgggggtgagcggcggtttctgggatccacgagcggtgttccttttgcagatttgataatatccgccattaaagctgatgcctcatctaatgcgcagctgaatgctcagggatccgggtctacgtcggcatctggggcgtccaccagggctgtacagttgtcgacttcaatcagagaaggaccaccagctctgccggagagtgcagctcgcgacctccatcgcgcatactttgaacatgatcacctatgctttccaattctctgccagcaatcggcaatggataatctaagaaaagtctatgcggaaccgtctacatttgaacggaaaccttacgagacattttgcttctatatgattctagctatttcagcttcgaatgttcaaaagcttcattggcagtcattgcccgaagcggaaacataccatgcacaagccatgtccagattgaacgatatcctagctttggggggcatcgtagcgctacaggcgatcctactcctctgtcaatatcaattgacaaactccacgcaaagaacatctggaagtctatggcacatggttgggatggcggcgcgaatgtgttttgagatgggccttcaccgggaagaggcgtataattatcgaaactctacaccagcctccactttaacgatgcatcctcggtggctttggtgtgtattggcaatggatcggtgagttcactgtgaacagttactgaagatgtgactctaacttttctttcgcgctcagcgtagtcagtattacgctaggtcgaccattcgcgatacacctagaagacgtggacctccaacttccagattacggaatcacacaacctttgagcacaacagaagggcatgagatacggccaacgggggagcagtaccgagaagcggtcttcgctcatataatccggtaccgtattctttgtggcagaatcatgtcatctctgcaccgaggccgatacaccaataacgaacattccgccttggctgcacaagccgagcttgccaatgacctggaagaatggcacgccaagacgagcgcattacaccttgaaagtggtgcctcagacggggccaaggtctccagtttcctgaccgttgagtggtacgagatgatctatcacaatgctctgctcatgttgtaccggccttctccagcgctcccattgaactcgtccagagcaaccgtggcagtgccaatcatatatgagtcggcaaaaaaggcgatcggtttctacgcacatcttcatgaattacagcgcatcaactatacctggattacgttgcacggtgtcttcatggctggtctttcctttgtttatgctgctggacagcatttccgcaccaagaagaaccagcgtcatggccagggatcacccatgctaagctccgatccgtcaattctggaaattgtcaacatctgccgctcttgctctagtgtcttggtggcggtatcagaacgtggggatatcgctcgtcattgccatcgtgtgttcgatcggctgagcgatgctgtgttatcagatgcggtcgaatatcacacagcacctcgacttggcggcttgccgcaaccggtccctcccacccctcctgcgttgtgcaacagtgtccctccaaatatcgccgcctcaaattacacaattgatacattgccatccgagggctggtctttccaggatccaatgctatcgtctctgcttgcggtcgatgatgtttttcgggattgttttgacgatctacagcatttccacgagtctgcgttcggtgaagaccccattggtcaactttcacaagattggttagggcagatcggtggttcgcaactacctgaaaccgacacatgagacgagtaagaaagttataagacatgttacatgatatttcaattgtacaaagctctagttaaatacatcctctctctaaaaattgtaccgggatgggaacaaccttacttctcaagtattccccaatccccttccctaagccgtcgatcctgctggagctcgcaatacccccgtccaagaagtctagtacccggaaatgaacggcgaaaatattggggaactcacacctttccacccttctatcggcatgattctcgcccttcgtccagtcatctccgaataggcttttgatccgggaaaccgtcaggaatgactgcagccaaggatattcgtcctgatttctgacgaagaaaccaatattggagttgtctgccttgtctccggatcgggcgtggacaatgtggcccaagggagctagttgcgtaggcccaaagctcgccaaatcgactgcatttgcagtctcgtaggaatctctgatatcggggtacttggaggttatcttcgggggctcaatcaaaatcgggctggaaacggtgcttcccaaaacatgtgtttggtggtcaagagacgccatcgagatgatgactgggaatatttccatgaacggctttgggtccatggtccggaagtcgagattcatatgatatccagggtagctctgcattcgtagcgcgtatattgggatcttgaacttctccgcacagatatcttccttctttttagcctgcgcgaaaacacgtaggaagaccgtgccagcctgctggctactgggatttgatgcaggggttccatatagctcgattgagaacttgctaaatttgtggtctcggaagatgtgcaggagctggttgcgcatcatctcgactttctccgagacgtcgagcccgttgatgtagaatgtagcctcggcctggtatccgcccttggctgcaatcattgccttggtcgttgccggtgggggagatccggtgataccatgtacgtgtacccgattcggggcgacctgctccatggtcacattgtggaggttggcaaccacgtccgggtttaggtactgttctccctggagttcgtacaggaattgagcgatggtgttgtgttttgtcacggctccggcatgtgcctcgggctttgtgatggtgcaacttccttcgctagtgatctccgcgataggaaatgcgaggtccaccagctcagggaggatagatttgaatccagagaagttggcacctgtcacatatggcccgcactcgatcaaatctatacttagttagtcaatttagccaattattcgctatacgaagaatactcacggcccgcaactaagccacctgcaagtcgatcccaatcatctcgagcccaattgtgccaccatgcggcagctccaatcactggtgatgcatccgtgactcgaccgcaaataatgatatcagcccccgctttgattccttcgacgataccccagcctccaatatacgccactccacagtatggctccaattgccagtccttgagtgcccaatctggatggtcgagatgcaagaggttctggcacttagcaggatcggttacagtctgggagatatcatcccccaaaaccatggcaatcaccacatccttgtggccccgcgcacgacacatctcctgcacctgcgcagccagagcctgtgtatttaaagcacccgcattagtaatgaccttgatccctttctccacgattagatcaatggattcagataattgcgtcaaaaagcccgcttcgtagcctaacgatggatcttggtctttggcaatggcgttccaggcaatgttcatctctgaaagccagtcaccgacaattacatcgacgttgccatcttgcgccatgcgccgcatggcgtgcgggctgtcgccggttgcgccggagacatttccgatgcggatatcgcgtttagggggcatactttttggattggatatgctgaaaattaaaataagagactcgcatcgatcgatctcaaggtatttgcctttctttaaagatcattgaacgatcgggctttatcggctcaatcgggttagcgctaatgtgcatcggaacccagtccgatgtttcggaggtcttggcccgacaggggagactaacacacagatttggagaagggagttggagattgttcaatatctgtttttattcggcctgatcaaaatgaagcgctctgtgctgggtcaattgccgatatctgtggcatatgaaagtgatgtagttatttccaagatcacacgcagcgcttgtttgagaacccatctattaatcatttaccagcaccatataagctagctgaaggatacttgtccttgaaaagactcccaaatgccaatcaatactgcagggctacacaaaggaaagcgttatgcttacttgaatcctgcatctttgctccagaccaggcggtacaggtggcccaccaatgaagtatacgatcgaagatctcgcaatctcgctcaatgattcttaggagaagcctctgcggaatcatcgaagtcttaatcaaaattggatcgcccgccataatatcattctgagattatcgagcccagagccaatcgcaacccgaggctatgctcgtcggatgcagcgaaccgggtcaaacgagtatcctcggctataaagcgccaaagaaatccagcaccgaatcatcgaggctgatgaacgtattaaacggcgattcatccttttgcctaacctggaacgccttaccgaaagtcgcaagtccgtgtctgttcaaactgagaccccagaggtatacacccactcaccttgtggtcatgcttcttcagttgatcctacggtgtggatcttgattaccgccttttcaggattcaagttggtcctcacttatgcgaccgtgcagggaatatgaaaagggctaaatggtccgcttgcagtttgaattgggcattcaattggcattagaggattggtgccacgatgggtgttttgagcggggattcatctctgtcattgtctgttttgcttgggctatagtttgggttatgtacatattatattggattgagttgcaattgcagaaccctcctatacagttgggttttcttacctatcgtataggctaagatggaacaatctcattgttattaacagttagttaatatgttgagggttcagattgatcctagaagtgttgatctctctatatttagtcagagcgtgtcggctatatgaaaggcatatcattggttggagacagtgtggatagccatgacgtactggaagatatttccaaggttgtagagaaagaaggaagcattgcaataattacgagtaaatcgaagctgtaaaagaatatacgcgcttatctcgtcaagtggaatatgcccaaaagggaaatcccccacggacaagtcacagccgagtcaattccaatcgcccggggagaatggacatgttgggaattggctcaacggagtattcaaccgtattcaaaggatctccacacgggaaatagcaaggtcagcaagtattttcccgagacgaagcccaatgagccggcggtattttgttccccacacgattgaaccggtgaatcaatatcggactgcccctctcagagtcatcctactatcaatctctcctttctctcaactcaccaccatgtcgcttcccattcgctccttgtcccgagcgttggttcggtcttacggtaccgtccagggttcccccagtgctgcttcattgaccagcatccccctcaccttgaccgatgctacgggtgctaccggtccccggaccaattggaccctagatgaggtcaagcagatttacgagacgccattgagccagctcacttatgcggccgtaagtgcaattcaccatatggcttgatgccgactttcagctatactgaccctatactgacccctctaggctgctgtccaccgtcgcttccatgaccccgcggctatccagatgtgcaccctgatgaacatcaagaccggtggctgtagtgaagattgttcgtactgtgcccagtcatccaagcacaacacaggtctaaaggccaccaaaatgagccccgtcgacgacgtcctggccaaagcccgcaatgcaaaggccaatggcagtactcgattctgcatgggcgcggcttggcgcgacatgcgtggccgcaagaccagtctcaagaacgtgaagcagatgatctccggaatccgcgagatgaacatggaagtttgcgtgaccctgggcatgatcgacggagaccaggccaaggagctgaaggaggccggcctgaccgcctacaaccacaacctcgatacctcgcgtgaattctaccccaccattatcaccacccgctcctacgacgagcgcctgaagacgctctcgcacgtgcgtgatgccggcatcaacgtctgctccggcggtattctcggtctcggcgagagtgacggcgaccgcattagtctcctgcacaccgtttccagcctgcccgcccaccccgaatccttccccgtcaatgccctcgttcctatccccggtactcctctcggcgaccgcaaaatgatccccttcgaccgcttgctgcgcaccgtcgccaccgcccgtattgtcatgcccagtaccatcgttcgcctggctgccggtcgcatcgcgctcaccgaagagcagcagatcgcctgtttccaagcaggtgccaacgctatcttcaccggtgagaagatgctcaccaccgactgcagtggctgggacgaggaccgcgccatgttcgatcgctggggatactaccccatgaagagcttcgagaagcctgagcccaaggctgatgccactgctcctactccacttcctgtgcactccgaggctacttctgcgccggtcgcagcgagcgcttagacttttagttagactgttgcctctatatgactgcgtcaatagtttggatcgggatgatcctgcaaaatgcaatttcaatacactcaatgaaacctaggtcctctatgtagttattccactttaggtattggtcatcctaaacccatcttaagatattgtcttgccatgacaaccttcaacttagaacccaatgccaaagaccagttagttcgctgggcttgatgcttgcatggagatcaaacctacgcgacctgtcctcggctacggagatttacacccctcatgtattccgtgggactcgtcgactggcaatgagagccacgactttaggaacgtccacgagaaagcccggtttgatgtgtggtgcagacctacatggacctcatacatatggtaatgttatgatccctgtggtaggtgaagcagcatgtgctacgggtccctctgcctgcgctgtctcggggggctacggtgatatggtggtcagagagatggggaggagagaagaagaagagaagaagagaaatgggggaaggagtccttttataccctcgacaaacggtaccttcctcgagtgcgacagctccctcgcaccttccctgacaatgtcaatgtcacatgcattgcgccttctttgtttgttcacacgaggccccaggtttaggaaggagccttcaagtcaaacaattattccttttggctttgtcaccgatctaccccaaagccattccgcatatcagaactagtcatcttgaccgttcgtcaatacctcgggctcaagctcatcatcattgtctgtctcgtaatctggatcaccaagctgaatccgcttccaagtaacctttgaagcagtcttccactcagcctgctggaagtctggcctcggctttttatagctaaaccgatccggatcgcgccccccacggatttcatagtcctcgatatgcacaaatgctcggaagtgtgaatagatgaactcgatatccaccgcttatcccgagtatcgcaaatatggcagtcgcttcatcaacgaaatcacaacggggttgaggtgaagctcctcgcacagggcctgattaatggcgtgacatcctccggggcctagacgacctccagatcgagatgtaattcagcggcaaatagaggcgataaatgtcactgatgatgttgaattgtatcggggatgcgaggaaagtcaaagtcggcaatatttcgtccttcggggtccatgactccacgtcgactttagtcctgcttgtaaattaaatcccgcatttagcgcagatcacccgcactaaataaccggccatgtctaccaattagctatcccccattttatgaagttatttgtccagtcaggtgacactccctattgagaagcggtgaacacaggcaataaatgaattgacgtcgctgctccactcttcacgaccaaatgctgaaataccgaggctcaagccgagtgcacggtgtcgactcgacccacgtcttctgagtctattcagtagaggtcaatcttcacaccacaaatcgcaatgattgtcattgatttcccttttggtgtcaatgcgactgcgttttgatgtcaggcttagccattcccaacgacataatctgcagccaatcctcaaatgagcattctctaccgtctcctgttgggtaaactgatccatatagggaagtgaacacacgtcattcaaatgttgtgtaaccagcgccctcgtgggaatgatataagcaggatggccgctgctatagatgacagagtccaactcgagcatccatcatggattctaaccatgctaaaccgttatccaaagattccatgcaatcaacatggcgcacagcacctcgcagcgagtggaacatctatcatcacatgctcgacacactcaacgcctaccccatcgacataaacaaggaggtaccagtgcatagcaaagatgataaagtgccacacatgccccagtggcatcttcaacgctgggttctcttctactccgccatccccctcctcctccacgagacctacatggcattcaccggccgcaccataagcccaatcgtcgcagtcgccttttacgtcctcgccttcaacgcgatagtgatacacgaaatgcacatcctccgacgtctcggccacaaatacggcttcctcgacggcgacaagcacgcacgggatggcatccccgacgtcggcatcggcaaagtagttacctcactatacaaactcaccggatcccgaatgatcctctcaatcgtcctatcctacgaccaaacacaacgaccctcgcagatgtcctggagctggctacccctcgaactcggactatacggtgtcgtcctcgacttctggtactactggtaccaccgattgatgcacgacgtcagctatctctggcaataccaccgaacccaccacctgaccaaacacccgaacccgctcctctctgcgtacgcagaccacgagcaggaactcttcgatctgtccgttattccgatgatgacgtactttagtctaaagctggttggtctgccgatggggttctacgagtggtggatctgtcatgaatatatcgcttttggggaggtgtttggccatagtggattgcggatgcattcgggtgtgccgtcaacgctgaactggttactggtgaggttcggggtggaaatcaatatcgaggaccatgatttgcatcatcggaagggctggcggaagagtcataactatgggaagcagacgagactgtgggatcgagtttttgggacttctatggagcgtattgaggctgtggaggggaatgtggattatgagaatacggcgaagatgcctttgttctaggtgggttgtgtgaatgatgggagattgaagggaatgctggtgtggttttgagtatcttatcatgaattatgacacttatgatataaggaaatgatggtatcgctctgtgtagtcaaatcctaatcctatatattcccactacttaggtttctctcttcttcctcttctcaaccctcaaccctcaaccctcaaccctcagttctcaactccaaaagatactacccaagcagctacaagccatcatctgtgtccaagcagaacattcgacaactcaccgaaatgttcgacttgaagctccgtcagctttgatcgaaggaatcgagacaacgaggaagagcgcgccccagtgtatagtcctatgggagacgtctatgacttttgcgcgattctagagtgggctagtgaatcctagtctcgccgcgaatccttgtactggatgtgggcgttgaggccaccaaagaactctgcgatgcgtctgcgctcacgatcccacgggattttcctagatggtctcttcctgcgaccgcaactatgaaccggcatacgtctgatctctaaatctcctctcagagatcatgggtcaatacgctgatctagagagccgctacggcgttttctatctcatcttgttttctttctatctccggtttctgatatcttaccttgatgcgaagtgactgggtcgcagtgatacagctgagaagatagaggctaagagaatctggccatccggaggataatctgccgtgtttgtccttttgataggctgcatccagatacctaagtggctctctgtttgtttgtagagaatcaacttcttctctctctctcggcttcatgagccttagaccagctctcactttactcaatgtgagactgtatcaatcgaagctgtgaatttccattcaattctgtttggcatttgacttttttcggggaatctgtatttgaattaacttatgtctaaataaaattcttcaaattggttgggtacatagctgaaagtctgaatacccaacaagtccgagatgatgcttgttgatagcacgctaacctcatccacatcgctagcctgtattgatagtcgaacgtgaggtctagatcgaagcactaaacccctgctctggctcaaacccagggccattctaccaacacctcctttgagagggattcttcacggtgttcgttgactatgtgcttgatgaagaagccttcgtttatctgcgctgagatcaacctgagcgatgatgtctagagaataaaattgagagctataattataccaaactctatcaacccagagcatgaggtcggcaagaatctcctcaattctagaagtaatatcttactagtagtatgactagtggatgcatctcgctcaactcggccatcgtccgataacgctagtgctgacctacacgaaccattacacacgatcggcaagtattttccgagccctagctagctcttcccctccgtacctagtcaaagcgtcctactagtcccgggaataccaagacaacatgtggcgtgtgtccaatccccacagtagctagcgcgaaatacgtggctctttccacgaggtggggatatatatgactgtttaaggggatgcgtcggagcaaagagagtttagtacgtgtgcactatataaacagctccactgtgttcctggtatcagggccggcgatacccacttccgcgaatgagaccgctcgcagcagcaccgcacaggacgcaggccatgtggtcggctcatgcacaggatctggcatagccggtttgatcgaccccaccgggtcggcactagtagtatggaaccagggggctgggaatgagggaaaagggaatcgagggtcgaatacggagtagtaagtatgagattattacgcacataaatttcatagcgttcacaaggatgtgtgtataggtacatattcgtgacggcgtagctgatcttacaaatctggtcctagaaactaattatacacttcaactcccgaatgagcgatccttctgcataggcggtctgacatccgagaaaacagaaatctccacctgcttcgtgatgcccggaccggatgaagtgggagaatcgggcgcgccttcgatagacgtgcccgtgcgcgctgtgtgctcatggcccagaatgcgatcgatgctgttgttctcgacatcggacttgaacctgcgcgtgcggcgcgactgattcgtctcgtttggggcaccggtcgttttgcgcccgctgaaaggcatgccgagttcgtaggtgtgggagtatttgccgctggagagcttgcgcacggaggacatgatcaaggggcggatgcaggggaccgaggaggtgattatgataatgacgttttcgatgtatccccagcggattagttcgatgccgcccgcggctccggtatttgtgatgctaggtacggagtccagtttggttgttttgatgatggacgcgatcatcgcactgtggcagggtcagtatattgtggctatacggtttgggtagaggtacttacacaatgcctaagctgagaagagcgatcaaaccgagcttgatgggtagtttcaaattcaagttccagaacacgactgtcgggaagacggccaaaaacagatcggtggctgagttgaatgtattggagtagtaggcgaatttcatcacggcattcaggttgccgcaggtcgtcgcagcggcgactgctgggtcccagagagcggctacgttgcgacagatgctaagcggtagcacggccgatgcaacgttcccggcgaattgaatcgccaaaacaacccataacgcggcctggtagtacttgtaggttccgaccagggggatgatgtagataataaatgcggagcgggcgatggtggtgctgatggtgacgatcggcacctggattgcgatggattgcgatatttttcaagaccgctgccttgtcgtctgcggttagggtgctgagattttgaccgaagccgtgccgaaccgacagggtcagaaatgcgcttgatacgattgcaaggatctgtagagcattgacgttagtcgagggtaatccacaagctagtcagggagatctgcatacctctgcgaagatcatcagtccatcatcgatgcgaaaccgattgatcttgatttttccgaccacgcgtaaaataacgatcaccgcagcaatggccaccgcagcccaaattcccctctctagggatgggccaagattttgtgacatggtgggaatataaagaggctaactggatagcattgtgaagtgatatataagagatttcagttggcatgacgggtgagagtccggaagaagaaagagcttagcagtttgtgtcatcaaccccggaaagccttggagaaaacgattggatttggaaagtcaacttaatccatcgggtattaaaccgtaaccgtggaatgctctaagatgatctgtggttgagccatggactggccaatctacgaccttggctggagtaggtttcgcgacgatcatttctatttgagtcaaaatgagccttcgagtcttggaagttgcatgttgcctattattaatccggtgcaaagtccccaaagtcaattcgtgcatggctggttctctctcttaactgcctctttgggaggattgaaaatgcgaataggacaataattggttcacgtatcataatgtcatagtaactgtcgagataaggccctataaaatacccctgaactacggaattgttaaacgaagcctcaagccacaaagcatacaatatattaaaggctgacatcctgaggtggggtttagtgggtttaattaaacaccgattggaggaatttcatctgcgttaccggcgcagtcaaacaccgttgaaatataaggattggcagaggcttcaagtaaaggggggttctaaagaagcatacagtccgaacctatatcctcctatagtggtaagggtcttggcacgaggtattcctcgtttaccccggcagaatcccgacgaaaagggcggaaggtagggctagaccaatagaagtatggcagccacgtgggcggtagaccttaaaactcacttcggaaagtaagtttgtccaatatatggggctaagcctgattgggcagccttggcactctttcccacggtcagaaaagtctggaagcgccaaccttgggattcctcaaccttcaacattccgaatcttggaatgaccggggttctctccaagtggggattcgacggggtttgcctgaagaactggatcagatcctcggcatttctggtctatccggggcctccgtgccgagattagattaaaaagctgaggttcgcaaaaggagaatagcatcatgttcttagaataacgctggaactcatctccggtcaaataactggataactatcgcaactgacatgtcgatcacgcgtgcatgaacactattatattgcacaagtccgggacttgtgcctgccgttcaacttactatctcggtcccaccccggcgaaattgtcccacatttattgattggactagacgcactaggaaacatctccgaatgttcagagattcaggttcattgcaggaatacaaagtcaatgtatatagacgggaatgatcggcacctgtgccttcatttctctccaaccttatccctttcatctcctccaccatgaagtggacattgccttccctcgtggctattgccgccccggctattgcgtccaactgtcactgtttaccaagcgatagctgttggcctgccccatcggcttgggcatccctcaaccacaccgttggtggtcgcctggttgctaccgtccctatcggtaccccctgccatgcacccaactacgatgctgccgcctgtgcagcgctcaagaccgactggaacaaaccccagacccagtaagtggtgcgagtatggcaaaattgacatcgctaattgccccagtcttgagtcctcttcatcggtgatgcaaatgttctttgccaaccagagttgcgacccatacacgtccaagaataagccgtgccgcctcggcaactacgtgaactacgctgtgaacgtctcttccagcgcgcaggtcattgctgctgtcaattttgcccgtgataacaatatccgcttcgttatccgtaataccggccatgagtaagtcgcctcaataatcctctacagataaatgctgattgatgtagctaccttggccgttcaactggtgccggtgccctctctgtttggactcaccacttgaatgatatcgagtaccaggactggtctggtccgacctacacaggccctgccttcaagatcgaggctggtgtagttggttaccagatcctcgaggctgcagccgccaaaggcctcgtcgtcgtcggtggcgaatgtcccacggtcggcctcgccggtggctacacccaaggcggcggtcactccgccctcagcagcaacttcggtcttggtgccgataacaccctagagttcgaagttgtcaccgccgctggcgacctggtcaaggcctcgcgcaccgagaaccccgatctcttctgggcactgagcggtggcggcgccggcaactacggcgttgtcatctccctagttgtcaaggcataccaagacgcgtccattgccggtgccgctcttgagttcaccgcagctgacatcaccaccgacaccttctacgaggctgtttcgcagttccatgctctgctgcccgccatggtcgaccacggtgtgactgtcatataccagatgaccaagagcgtcttcatcatcgaccccatcacagcctacaaccagactaccgatgacgtcaaagccatcctcgagccattcacctcgaagctcaccgagctgaacatcacgtaccaagccagcttcaccgagcacgactcgtactatgaccactacaacacgtacatgggtcctcttccttggggcaaccttgacgtgggcgcctaccaatacggcggacgtctgattccccgcagcaccctcgagcagaactacaacgggatgggcgacgcactgcgcaccctgacccagggcggcttggtcgccgtcggagtcggcatgaacgtctccaacccagtcaacgtctccaacgcagtcttcccagccctgcgcaacgcagccgtgacgatgcaattcggcctgccgtggaacgagaccgcgccttggtccgagatgattgcggaccaaaagaagattacgactaaatatgtgcctgcgctcgaggctgtcactcctgacagcggctgctaccagaatgaggctgatttccgccagccgaactggcagcagaccttcttcggaagcaactacgcccctctgcttactatcaagcgcaagtgggatccttcgtcgttcttctatgccctcaaggctgttggcagtgatgcctggtctgtgtctgattcggggcggatgtgccgtacttgagcttcttgagctagcagatttcatttcatagcgatttacagttcctgtttagatgttagagatattttcctattgtgttgactaattttgttaccgaagatcatgcccaaacctgcacatacacatggaatatcatctctgtcggttcttatccgaagctataatgcatctttttgtagcccttattcatcgaaaaatagtatcttaaatatgctcgaaatgctcaaagccaaatctatgtacagaaatctataaccaaatcaattgatatcgccaagtagcaagtgtacatcaaaacatatatatacaaacaacaagcctagaccgcagcattattaccgcaagagaagctgtcattagaagagtcatcatgaatagccttgccggaaacataaaggccaagaccacacatacaaccaccaatcagaataacgcacaagttcacaacagtgagagcaatcttccgcggcgaagagaaccacttgcccttattaatgaacaaccaatacacaccacccagaccataactgaaccaactcgcgaacagcgagctaatcaaactcagcaaatcactgaagacgggaatggcatcggcaataacccaggcaataacccagcaagcaagaccaatgcctacccaggaaccaatggcaaccaagtcacgcttctgcatgcggtcggtgcctcggaacatgcgcacgtagatgtacttcagaccgatgtggccgttgacgacgccggcaccgataatctgagaatgtcagctgctggatatgggatcggatggggagaacgtacagttgggatggcgattccgtaagccacctttttcatgataggacctgcggatccaagagcgggggatgtgacctcctggccgacatagtagtagatgaccaccgcagcaacgacgtagaagacaatttcaaaggtctgcagcatgaccagagccttggggaaatccctcggttcctccatctcagcgagcagaccgaagaaagccacgtgggcgcagtaggcgaagacgatgttggtgacggcgccgaaagcctggaccaaatcggtgtcgacggtagccttgagattctgaccacccttgttctgcaccccgactgcgaccatagtgatgatgacagcagtgacgatactgataaaggctgtagaagacaattagtgattattctctaagtaaggaaaatctggtacgtacacatgcacgagatataggtcatgttcttcatagtacgaggtaaagagcagacgaaacagatgacgaatccaacagctgtgaaaaccatcgtgcaagtgccgtgttcggtaacggtattcatcatgacgctgaaagtcaagatgtgggaagccataatgaaaatcgagaagagcagctggccgaggccgaacagctcgcgtccaaaagcacctaacaagacctcgccggcatcggctaaattctggatatgggggtatcggttgcggaattggtagattgtgtatccggtgtaggtagcgagaatgcccagtccgacgatcaggatgagagctggggcaaggcctagctgggcgagggtcttgggcagggacaagactccgagagagacggattcggcgatcatgactagatggtggtcagagttggttcattgtacctaatcaactgataacagttttgatcatgcgtgtggtagcacttacacattcccgtttgcctattacggaattagcctatatccttgaagatggtttcattgcgtgtacttaccaccacttcatagtcttatacttaacctcggcaccctcctcatctccaaaggcatcctgatactgtggcctctcctctagaatcttcttctcattataccccgactccgagtcagtcgggtcctggtagggtgtcactccatctggaatcatgatgtcgacgcgtatagagccaaaactggaatatagaaaagacagaaagaaagagagagcctagccacttgtatatgtgcaaaaggaaaaaaattctcgaccagaggtggatctttcctcaacgtctgagacaaccccggcttcacttgtatggagagttggagggcaaaattctggagcccggatcttctggaaggtggggatgtaccgggctgaacggtgaatgaatttatatttcctatttcctatttctaccatatttagttaatattgcggctcactgagacgaaaaaagagaaaagctttgatgccaagttgcgatcatataaattaagcgtagggagacccgcttctgaacagatgagtggagtcattatgacccgctttcctgaaaatgggccaattacagactcggctcggaattctattatctaagaagaacgccggactgcgctgctggccgatggtagccgcttccaagcttgtcccgggccaatcccgagtaaatggcttcgagctgttactaaatgccaagacgtgcagccgtataatcgtggttactctatgcaacttatgtcggttattgggaatatggatgaacggcatcgtacgttgtacaccgtacctgagagaaggcaaatcttagggctcagtagccagaagaattccagtatacaaagagcaactgtgggggagtgaagctctttcgccaccaaaaaaatcaattctagtcaagccttgccaatctcacctaggcaatggttcggttatttcgtaaagccgcatatccgaaggataatgcaggccattggggcagatgctgctatttgtttggaccaaatagacccattattataaataataactcaatgctttcctaatcgggactttctattatataccacttaccgaaatagacaatggagtctccgtacctatgtattgtgtatattgtacatcgtacctccctccacattctggtccctgcatctccagacttaccccaggttgcaagcaattcaaacgtaagtgaatgttcaaacgcgtgaataatgattatccgcactcgggctagtcgtaaaaagcactccactcgtagttatcgtggggtccgtcttgtaatttagttaatgagagtgttgctgctccacaaactcctcttacggtgtatctatccaccgaagatgaattcatgaaccaagggccggaattatccgtgaatatattgactagttgtccacacccgcagaatagccgtaccccactaaagtagcgaaggtggtcttaacgtcgagattccatggggccgacaacgtaggcttgtgcaatatactattctgtagggaatgtcattaagttgctagaattgacttaattgacttatccatggtggccacggtgtgtacatcgcatattgtagacttctaggaaactttggcctgggctttgagtagaggaggtgcctgggtgttgaattgaaattccgtctagaagctaccgtggtcatttcctcggatttcctgatgattggggtccagtcagatatgtcctcatcgtcgcagctggtgcatgtgtaacgtgtcgaggaatgtgttcagggcagtcgtcgtggtatgatttgcctcgacattagttgggtttgaggtacacatgagaactctaaaaatagcctagaaaatacattcaaagatgaacgattctaattaatctgatattccattagatcagatctgtcgctcaagcttcatctgatgaaacgtcctgactacaggggaatggagtgatcaaccagaagcagaaagatgaagattgatggaagataggaaactagctactgtacagcttcgtaccacaaagccagctagtgttagaacacttctcagaaggatatatcaaggtaaaataggttactatagcgagcatagttaccgatagatctactaaggcactatctcagtccaacaagcccatactacacttcctaaggaggtatatcggagtatacagaccggcataccggaggatcaattaatcctatatgttttgtaatttagttgatataatcatggccctgtaacaataaattgtgtgaggggggccaatacagaattccagacaattgtatactattgattagacggccaatttttacacatacagcacagtcgacatatgcagtcattccacgggtaccgtacgggaaattcaccagacgtacctgtctataccatgagtgaaattgtgagaacgcgttaataatagcttgtatatggcttggtagctccagaccatgactctcctttcgagcgagtatggctctcgggaggaaatgagtcacagcacggcttgctgaagagcacgggcggcatggaaggctatagctcatataagctcgctcttagtgctccgcctctcctagtccaagcattctaggcctagatctagatctgacagtgattgcggctgggttcttctttgatttcattggcttaagggtggtgagactcggcaaaacaatcaatctcaaccccgcaaagatcagacgaaaatgaagatctcgaagatatcgaggtattactggctggagactctcaaaaatcactttttaccatagatgcagaaggggtgacgctggaaaagttgaaaaattgtaaataattggattacagtgtggctgaccacttaacgtattcggtaagcgagctgcgcagtaaatgcaacatattccacatttatatctccacaacgacgtttcaacttgcttttattacttgtcgatagccatcgataagaacttttagcaatatatctcaatctcagagaaatcggaaagttgtatcattgcggtattgaaaattacatcactgaactataagaaatatatatatctcaatcactattacactaaatttctcaaaactccctagagtgatcagatatcatatggagagcaatatgctacaagatagagttcatattgaccacagttgttgcattatcatgttgtaatttatcgcttttactatatgatttggggtgcgcagctcgcttaccgaatacgttacgagataagactcgtgtcaatgctaatactactgcacttaactcgcctgcatgaatcatagagaggtctcgtatagcgacggcatctatcgaaccaaaaacaagagttgaactgacatacatctgcatgtcgtcggcatgacttgccttgtcttgcagccaaccacgtctagactacgttggatcctggagcaattcggcccaggcttcctaatctaaagccggcgctcggatagtcgcccgtatacaagttacgctggagtgatagtggcgtttctgattgcagtagccatgtttgcccgggcgtgcgcttgagatgtgtatgcttgctttttactagacaggctattttaggctttgctatataaccttagaaaactatctactcagggatttctctcatttattcatcttcccacttcgatctgaacactgtttctccctcaatctcatttcccttgggacatccatacgaacggacatcttcaatcctactaggggctgatcatgaagaacattcgtaagagacatgtcattcttgtcgatggaccatggtacaatgatgaaggggagctccgtgagtaatcgaaagcctagtcccttgacgtgaagttacccaggctgactgagtccagactatggtagtggcggcaaaagcacaatatggcgaatcggctcagcgacgaaagagggtaaggtagctgacgataagggagacgtaaaccaggtgaggatatatcatttctatcgggcaacatgtctatagtctcataatgtgactgacatattctactgcaggttattcgatatttcaaatcgagtaaaaagtccattatcgacagaacgaaagagcttgtcgacgtaagtaaaaaaaaccaatcactatcccttctacaagctaacaaattgtggaagatttgcaaatcagcaagtacggaagatgagatatggcttttcggatttagcaagggtgcatgtaagtacaacccttcttctacaacgaagcctcaccaagctaaataattggtcccaatcagtggccattcgtgcggtggtagatctcctttgggctgccaaacgtgacgaacaccggcccgtacaacgttctttctcatcattcttcaaattgaagaaatcttcaagttcgctggttgaggtatgtcaaatgtcgtctttatccccatgccttctgatactgacctggcctctattcagctcgagaaatggtaggaacggaactttgggacttgaaatctagtccccttgctaatgtatttaggattcgtgaaagtggagcaaagaaatgcctgccaaaactatgttttgtaggactatttgacacgatacatgattcatccgtcgatcaatcgttgcaatggccagcctcgatatatctttatcatgcagcttctatgcatgaagatgataacacacttaaggttcgtctgcttagtgaggatgcatcaaaaaacgcttatgaaacacccaaatacgttgaagcgtggttcgcgggatctcatatagatattggtgggggcgcaaatcaagatggactttctctttatccactgcagtggatgttgatcgaagcccagaaaaaaggattatgcttgaacaagcccattttacccgataagaaggaagggcaacttgttgaggacatagtgcaacttgtttttccatcaagcggaaaaaccttggactccaagtcatcagtgatcgatccctggaccttgagatatgccaataacctcacgatccagctatacaatttgcgtatttctcaccagcacggtaacttgcaacaagagcaagatcagcgacctaaaaagaacgtccttatccaagcaagaaaggagccagggaatcatcgcattcccgcaaatcagcgacacaacgtcaagttgaataaaacgagaccctatacgcaacaccgctatggaggcagtggatcaatatatcgagctatattcgcatctgaagaaaccgacacgccgtctgcgtctaggaatgaactggttggttattctcatgattgtaagtcaatcaaagaagcatctgagatgagaatatacgctcaaaccaacgtcattaggtgcttttggggtagtaatacacccttcagtatattttctgatggatatctatcctcggtatctgaaggtaaacgaattgcccagagagctttccttggacctccaaagattccgagaaacgaagttgcttaaagagaagcaatttgacccctgggtctcagcatacaatttggatcatttacccaaatgccgcatccttgtttgtggagccactggggttggcaagtctactcttcttaatgctgtgtttggcattgaattggtaagtaatgtttcagaaacgagaacttattagacagcatctaattgatagcagacgcaaacaagcgataaagaatcggtttctcacgatatcaatgaggcattggaaagcgatttgcaccccggaattatcattcatgattctcgtggtttccaatatggagaatcaaaagaagtcaatatattgagagatttcattgagcaacgccaaaagtcagcagacccaaacgagcgactagacgttatatggtatgtaatctcaaaccctggaatgttcatttctagcgctaaagttattttaggctttgcatagaagtatcctcaaaacgacgccttcaaccagcccacgctgagcttttccatgtgttgaaagaattcgattgccatacaccggttattgtagtgagaactcaaatggacaaagagcttaaggaacggcagtttgatatactcggtgcggcagcagaaggccagaaacagaatgagtcaaaagaaccaaatggactggcttgggaagtaatcaaagcacaggctgagaaggagtttttcgaggcagagcggccatttgaaatggatgtcaaaaaacatgacccgaaagcttgtgtggttcatacttcaaagggtaagatctatgactctgacctgaattcgacttttcagctgggggactttgctaaatcttacacagataccgattcttctatacgaaaacttgtcagaacgactttagaagaagttgaaagatacagtccagaaagaaaaacttctgtcgcggctgccttgaggcgtgacatggattttaaaatcggagtggccattcaaaggacgtttgacatgataaactacgatgcccacatgtggcaacgagtcatagctgcaatacccttgactgactctacaacaactcccataatgtgccgggtcctctgttctcgtattctgtcttgcttcgggctacccaaaatcccaccagacgccgcggcacacgtgttttcgaaggttattttgcgaaacctttccaggttcatgatggaaagcatcggcactgacttttggaatatcctcgctggtgccaacaagcttctcctgttcggaattgctccaatacccaaggcaatgtggcctgccgctaggatggttgttaaatgtgcctgtgatgtgatcattatccttgatggagcgatcaagcagagtggattcatggcgactcccgaaaacctgcatgaagttcaaatggcttacgcactgaattacaacccagatgagcttccgggtagtgaaaagatgactctaaggcagttgacccacaaagatgtcaatcgtgagttcaagctgagcaaagaattcaatcaaaagctggagtatcaggtcgccaggcacaaaatgatgaggattgtcatgacgcacagactcaaagagaaagctcacttccgggcttcagccccgagtttctatcaagagacagaaaatcaagacgccctggatgcattattttcgggggattcaaacacgctcggtcaggagattgatgctctagctcagcttggagcagacgggtgtatgtccggtcaatatgacgaagaaattgcagatcaatattcagaatacacgtatagccaagacatggacgattcattgtgcagaagcagtgtctgctttgatgactcggcgagttgaaattgccatacatgggtggaattatacacatttgtctacaatacctttcggatctccggcatttctctggtttaatctgcccttataatcttgactgtctcggatacttgcttctgtatatatctctacggtagcattagggttctacttcagatacaagataaggcttcatattcgaaagatgatcaatcgttgaaagacttgaacagattgagtagggcaaggacagagtttgaagttccatataatcgatttaatacggccacgctataatggtttctactttaaagagattatatgtggccagaaagccatctcgagttcctgctggcacgtagatcgtggatggacacgcgaaagaagctgcgcaggggcccgaagaaccacggaactccctcaatcggtttatctgccttgaacgaacgcgctagcggctacgacggtcgagaatgatgatggggttacagggcgtgtttggggtagatggtatgaaggtagagcagggccaggaacgttcattttaatgcggtgcaagtggtcaattgttgttttgtgtctacattcggatgggtcgagcgaaaggctcggactatgagaatgttgtcgaccgtagaagagggaacgaagttaatgggagggaatagagtaattaactagaagtagaaagataaagattgatacaagataggaaactagctactgtactaaggcttgtctatatagcttcgtaccacaaagccagccagattccatctactagaacacagaagaagtatctctacggatatataaaggagacgccgaagcgccaagctgcgcgtttgccggcaaactgtctgccagagaagagaaagagaaggaagtaatgccatacagaaggtctacaaactgcatatggcaacagtgagcacgtcagaatacgtcaccatcggactcatcatacctcttccctgccagccttgtgaaccacaacagagtcaagatctcaggccttaggattcgagcctggtagttgactcggtaaatcagtatgagatgatttagccggcacagcgatgtgacccaattcagcgtcttgatgagaacttcccgacgtctgtggtaacgaagatgatggatgtcttcgtcctttctttttccattggcgcctgtaaaataggaacgcgccgacgaaagcgagcactacgccagacgtagcaccgataccgattccagccattgtaccccttgaagtattgtgtggcgggctataggtgctcctggggcgtatgctagtactcgtgcgggttccatccgcggtactggcagcatgcgctgcttggatcgtcgcaaagccaagacctgcaatcgttggcaatgcggcactggggttgataggccagtatgcattgatcgatggacaggaaggagtaggaagcgtaggtggagggagggtatttgcagtcacggcagaccaccttttcaacgaattgtagtcggccagggttgtttgcgtgctaacctcgaagagccgcggcgcatggtggttgcagctagtttcagagatgataacgggaacccctaggcctcctagcctcgacgtcaatacatcgtagtcagaggcgctcatggacgagttgcacccgagttcgttgactgcatagaagtcgatagcctcgtcactttttcctccgcacaccaagtattctcccaacgtttggatataggtatactctgaatctgtggcgtatccaataggtatagcgcggtacttcctagcagcagcataagctttcatatcccgggctgcggcctttaggtatggggctaggtcgactgtagggcctatgtcatacatttagtgagcgcaaagactgtgagcggtgggtttcataccttgaccagtaatagtttggctggaaataatattatttccaataagaagccccaggagattgctatacccggccattgaatcaagaacagccgcatattgttcgaaaacgcccatttgccatggtgagttgaccttgcagagatgttagtatccataaagaacacacgaacaaccgaaaatgcttactatgttcgagctgacatctgtccaagctctttgagttgccatgtttgcaatcacgtatattccattgtcctggaaagtctgcatgcatttatcgtgaccctgagtcgcatctgtatagtacaccctgatagtgttggccccgagtgccttgaggataggcgcatcgattgcgcactggctagccctcgaatctgccaaaacatcgattgtagtcgaaccagaggcatctccgatgtaatcgacacctgtttcagatgttatcttggcttggcatcgataacacagttcaaatgatcttacctttgatctgaaatcgatggcccctactcaataacccattccccgcgaccgagataacaggcagtgacatctcaagacacgaagacacaaaggtggcaggagatgataaacacggaaaagactgcgggggaagtgaaaaacagggtccgaggctatatctagggcgccatggcccctacataggcttgcccaacccggtatagcgcttacatgtgaagcggtttttaagattgcaataagcccggttgataacgaatcctaccttgaggtcatggcgtatcttatagaagtccaactctcacggatataaactgtggagctacagtcccttgattgtaggatccattcatccatttttgcttcatattgctccgcgttattaaatcataaggtctttaggtgttatgtacgccagcggccttccagagccagccccggacctgcaaaaactcgctcagagctcagagctctgtctgccctattcgcaccctaacaacacttcgcacccacggaacttcccatttactactcgttcgcttgcatttttactcacattaaggatgacacggtgaagggaggccacaaacggccgcttttgacaccattttaagccgctcacgtggccggtcttggcgtcacgtgcaccaaagcccacgacccgctgcgggttagccgtgtctggttctacgtatcttcaacttcccctgtatatacatacatacactcgcaagattgaatccatgtttctgtaatggggctcgtcgaactacccactgagatcctgtggatcatcgcatcatgcctttgccgctaaacggatatttacgccttcgtccacaccaatcgtgatctatacgaaagacttatcaagtctctatattactttcacgcccggtatagacatggagccaggctctggtttctcgcccagcggaacctctttttacaagttcaaagtttgctagacgggctaaatgctgccagcaaccagcctccagcatcccgggcagtgatagaagcaacggaacggaaacctataagaatgtacgaaaaaggcacgatgctaagaatgtaggaagaagaagaagacacaatatacagaatacgagaaagtctggaccctatggatatttctacccaccctcttctccaacagggatacagcatcctgggtattaggaatatccagcatgctctagtgctggcaattaagggtggctataccgaaactgtgacccttttactagactttggtacataggccaacttctacagtagggaatctatattggctacttacaattagtggtatactaaggcgattgattacccgcccctctttactgcggtatagcacgtgagggtagaactagtgaagttactgcttcagtgtggtactgatctagagctatttgccccttcaccattatatcgtgctgtcgaagataatggacgggaaattatccctatattactcgaatacagtatagggccgtaagtaatagcgttaaagctagctatactaaacgaggataagtctatagtgagatttcttcttaatagaggattcaatatttcaaagtacggacatactggactctatacagctaaaatgagggtgacaaggatatgatcgacttattagagtctcggggtgtaacattagctgcacttactaatgctgaaaaggaaaagtgggagacggcagacggggatggcactctgcctctttttgataatgtgtttatttccttcgaggacgaggtcgatctggatgagggtgagggtgaggatgatgagttccggaattagtatgagtattgatgggtacattttcctgcatcacatattttcaaattggttccctttatttttttctctcttatattcctgattgtacaaacgaatgcacaactgcacaactgcacagtagatatgattaggtattcacgtctatagtacctacactaatgctgaacggaggagacgctccagttctcgtagcgactcgggcttggaagtgacactagacatcaagtaaagcacgtttccaaggacgcgcgagtgaacattgaactgatcaccaccaacagccagcttctgctgcagtccctttgcagcattggagttgtagcctgtcatatattagctttatcaatgattcaggtctgaagaacataacatacctccaccagctgcatcacgcagtgagatactcagcacggttccaatggcgaacacgctctccacggacttcgtggaagagaggtcctcaagcagaccatgtgaccagacactccacacctcgggagctgaagattcaacagtagcaggcgagctgctacgccagtcagcgcggtatgcatcccacgatccatcggtatcaagcttggccatggtcttcaaggagtcaacagcgaccgtgcatccaactgcatgggcggtgtaactgtggccgtggagaagggcatcgctcttttcgggactcgagaaagcattgaagatttcctcgctagcgacagtcgtgcagagtggtaccagcccgcccgtgaggagtttggcgttgacggccacgtcggggtgcactcctaagaaagaggcggatgtccgccgaccgagacggtacaatccggtgaagacttcgtcgaagatgactggcaggccggaccacgacggggattgtttgggtgcggtagcgttgggggaaaacagctctgggtggtcgcggaccacatcggtcaggcatctctggaagagagggtcactaagggaatcgttagttcatgtaaatgaaggatcgtagtggattcttaccagaaaagcattccacccgcaccgaggatgaccggttccaagatcaatgctccaaacttcactccttggcgctgaacgagatcttcaatagtgcgacggatgtagtccttgtaccgctgggcagtggcagactcaagacgctggctgaggtcaaacaccgatcccaaggaagcgaaatcaacatcctcgccgagttctccctgcagctcaccggggatctcgactttccaagatccgccaaccatcttgacaagaggaaaatcgaaccagtggccacgaccacgataccactcaaccttcttattgaatgtcgaaggttccgaacagtccatcacaccgatagtatcaccgtggtagctacccttgagtccaagaataccaacctgctcctgggaggcatcccaaccgtaccggtcgcaagaagcgcgtagacccatcttcacagcaacttccatccctgtacttccattgtccgtgtagaagactttagtaaacctcgggttttcgatggttttcagtagattatccgcaagcgtcagcgctggctcatggacagctcctgcgaacatgacatgtccgtaccgaccggcggcataggcagcagatagtgctagttcggggttaccgtggcctaagccttgagtccaccaggacgcggatccgtcgaatgtcgggcgcagttcaccctctgcatctttggatgtgttggagccgaatgtttggaagtagtcatcatgcgctgagtcgatgacggtaatgtccttggccttcatgccttggtgctgggtaaaggggtaccatatcagctcttgcgcacggtcggccatctcttcgagacgctggacgcgctcggtattattgacggacatttcttcaagcaatcggagaacctccgactcctttgcggagttttggtagtagctgaacatggcctcctcgtcccttatttgggagtcggcatccagccgcgacggtctggctggaggcgctggtagcgacaccaagggaatgctctttttctggaagtattcccggaggtattcatgattttgatagtactcatctcggaacacgagaaccgatgagatatcatagccacggagaagcaacgactcgtaggcagaaatcgaagaagagataccccctagacgagagtctgccaccaacacgattggcatccgaagtggtcgatacaagtcagcctgtgagttgccattggggcccggggagtgcacgcccccggccgtctcaacaagggcgaagtcaatgtcggaccgcgcccagccggacagtgtgttgtgtatggatgcgagaaggtcatcgtctcgcggaacctgcgcgatgagctttaagtcttttaattaggacaatcgcacttacaaatttatcctttgctgccaagtgcgggctcacgggatcgtcgaattggtagagacatttggtgagcgtcccggcgccataacgccgcaagtgcctgcgaccgtcagtgaccggaattaattcaatcgaattgcttcaaagttcgcctaccgatcatcggcatcatctaatgcccccgtagaaaccggcttgaggaatgcggcgcgctgtttctggtgttgaaccgcattacacagcaccgtggagataattgtcttccccacgtccgtgttagcgccgtagacttggtgggctcgtaaactgcgccagagcgctgcgccgaccggaggcatgacgagatgaatgaagtgagtcacgatgaagtccaagagacctcggcgggtcaactgccattgagtttccgactccacgcaaatccccacaattttgcatttcaccggattgtcctgttgggtttctcaacgacttgggatcttggctttgggaattgaattggttctcttgccaatctcaacaatcaacaatattcgaatcggaaatcaagtggatagccgttgacaggaacagtacaggaacagcacaagaacagaacaggaacaggaacaaaagaatcgacgtgatcatgaaagccgatatgactcctccggggacatcgaggacagcagggacagcagggaaaacatcgcacaaaacactcgttgactcactatccgccactttgtcgcgccgggaagccaaatccgcccgtcggaggctgaccattttaccccggacagctgtggatttctcctccaatgacttcctgtcactgtcaacttcctctgcataccgagaacgctttctggcactgttgaacaacacgccgccatcattccctcttgccagcgggggatctcggctattagacgggaattcggcttacgcggaagagctcgagaacttcctcgcgacattccatcgagccccgacagcacttctattcaactccggctacgacgccaacgtcggcgtactatccagcatcccccaaccaggcgatgtgattttgtacgatgagttcattcacgccagtgcccatgagggcatgcgtctgtcgcgggccggtcctcgggagatgtttgcccacagttcgccggttggcttgagagaggctctgcagtcgcaaatagatgaagacccagctattgcggaaggcgcgcgcaatgtcttcgtgctcattgagtccatctacagcatggatggcgatgttgcgcccatcaaggagtttatcgcggttgttgatgagctgctacctcaaggcaatggatatttctacgtcgatgaagcgcatgcgactggtgtgtttggaccgcggggtgcgggcgtggttcaggaactcggcgttcaggatcgcatgttcatccgagtgcacacattcggcaaggcactagcgagtcatggaggtatgtatgatctgttttgatcgcccgttgaaataccgaactgaccatatccagccgtggttctctgtggaccagagacaagggattacctgatcaactatgcgcggagtttgatctataccaccgctctaggattcccattcctggcatcgattcgcgcagcctatgagatcctagcatctggtgaaaccgaatcagtaagttgatcatttctccatactcctaatacccagctaactggttcacagttacaacgccggcttcaggagttgatcggtcatctccgacaacgactggcgggcctccatacatatcaatcagtcatgttcgaagtcgaccatttccccacatctcccattatctcccttcgcacatcccagccgcgacagctggcgagtctctgccaggaaaacggattcattgttcgcgcgatcatgccaccgacgattcccgagggaaaggaacgggtgcgagtgtgtttgcatgcaggaaacaccgaggcggaaatcgatggtttgacgcggatgattcagtcgtggctcgatcaaagtcacagaaatgtatcaaaattataaaagtatgaggtagttgatttgcatctgggattttctactagtaatctctattcaaggccattcatttaaattgttatctcataggtcgttatccggttacttgaatgcttatatgcaaacaaacaagacgatgtttcatgtccttacaatatcagctggcaaacttcaaccaccccgtcctgctgattatggcccataatccaaaatccagcccgatcacgttgtcctgcttcgggtatcaaaatacgcggccagcccttagcccgacggtccgaggttgccacctggtcttggtacctattgcccagcctcggcaccagggatggatgtcggcgttatatgtggaatggatccgggattcgggccgtgatgcccacttattcttcgtgccaaatacctccgcaccgagactatcagtgcggagtatcgccgaccattaccgagggtgtttaaatgggataccgacgcggaaatcaactttgagatgattcggagctagtactccgtagatcaaatcaaagtacactgttgtgtaatgcctgaagtagtgtgtaaggccactatgtgcgaacttcactaattcgatctcttggccgatgaagaaagtccgtagaatttgagattttacagggcaattgttgtagaatgcatctatttctattgatttaaatcctctgtacttgaaattacttgttcattagatatctagaccatagattgctccaccttcatactagcctgggtatccgagcggtccatagtggtataccgactgaaatctctcagatcccgacggtcatcaccaggcgaaacaccattcgccactgccttgcggtcctgacgacggaagtaaacacgcttgcaccacttccagctctcaatacccaagaagaaaagcaccgtctcaacaaacacaataccccactcccaagaaatgctggtatgcttgaaaacactgtgattgataacaggaatgtagatgatagggaatgcaagaacgaagccagtcatgatgccgaagaagaggaacttgttgcgccagatatcatgcatccactgggtgtagcgtttcttagagtcgggctgcatgtggaagaagctgcggcgcagatgcatcatctcccaggcgaggaagagggcgaaccaggtcatgcaggtgaaggtagtggcgcgggcgcggaagactgtgtcgcagtcgtagggtttgttggggtcgttgtaatgtgtgttgcagccctgagcgagctcgccgttgccccatcggaacatgacgagggagaatgcggacagacagagggcggccatccagactccgtagacgagggtgtcgacgatgatttcccaggtgaagataccttgtttctgtgatttgttagtaaattgaattgttagggtaaggcttggaggaacttacactttgcggtggtcggtccatcacttccggggcggcaatctccattcccagacccatatcagggagaccagatgtaatcatgataatccagatgatctcgacgggggagatagggaagacagactggttggtttcatccttgaaggccaatccaataagaagggtcaatgctaaagcaacgttctccgcaagaagatgtagaacgaatttctggatgttatcgaaaatgcgacgaccttcctcaataccgttgatgatagaagcaaagttatcatcggacagcactagctcggaagcatccttggccacatctgagccattctgacccatggcaatgccgacatcagcccgcttgagcgagggagaatcgttaactccatcaccagtcatagccacaaagcgcccacgacgatgcagggcatcaatcatacggactttcgtattaggggcacagcgagcaataaccaacggaagggtgggaagttgatcaatctcatcttcggtcaatttgtcaaactgggaagccgtcataaccatagcatcggcaacgtccttcgcgatcatatccatgttcgcaggaatgatcccgacttgggctgcaatcgcacgcgcagtaccggggtggtcaccggtgaccatgtgcacggagattccagccttgtagcaaagggcaatagcaccagctgtctccggacgaggaggatcgtagagaccgatcaaaccgtagaaagacaaatccttctcgacgtcctcgcggggaagagggctgtcgccttcttttgcaggattggtgttctcgcggccggccatagccagcacgcgaagaccctctttagccaaagcctccatgttctccaagatttcatcgcgtatttcatcgttgataggaacgggctccgagtcaggcttccatttgatagtggtgcatgcctcgagcactcgctcgacagcacccttggtgaagatcatttcgcgactcttccctgagttattgtcgtcgcgctttgtgaaaataacagacattttcttcacggttgagtcgaatgggtactcggcctgttgctgccagatcggcttatcgcccttggtccagcgagacagaccccagttgaatcgagaggcgaaaacctggatggcaatgtcggtgggttcgccgcgagcctgccatccctcggtggcactttggtgaagatgggccaggttggccatggcagtgacgttgaggaagtccttgagcgtatcgttatcttttaacaagtcatctggcgatgcaacatcgcccaatttttcctcgcctagtttgaccgggggctctgcaatcaagctcagctcgccgtcttcggggttgagaggttcattcgaggcaccgacggagtaagttcctagggatgggagccaagccctctttgcgaccatgcggccttgggtcagagtaccagtcttgtccgagcagatgttggtaacagcaccgagcgcctccaaggaatccagcttccggacaataacatggcgctggaccatctgcttcgttccgacggccatagtaattgtcaacacgaccaccaaacacgccggaatcatagctagaccagtcgcgaccgcataaatgataacctcgctatcaccgcgccagtcattcgacgcagcaaccacaatcgcaaaaataacagcaatggcaaagagcagaagcgccagcttggacagtttccgctgcaaaggtgtaccaacattggtacccaagaaccggccaatggcatcagtggtcgtcaatgtccaagcctggatataccatcgcttcttcgtttcgccttcaggtccacgcttaacagggcgacgtttcgggtcggtaccacggagggcttgcgcgatagctccaatctcggttctcattccagttcccacgacgacaccgcgagcacgtcctcgggtcacggttgacgaactgtaggctatgttcagtctgtcgcctgggcctgtgtcgacctcaaaggtggcctctgcatctttttggactgggagggactcgccagttagcagcgcttcgtcagtttcgaaattgaatgcttcaacgagtctatgaagggttagcttggtattctgatattctatacgggttggtacatacctgacatcagcagggacagtatctcctactttcaattcgaccatgtcaccggggacgatctcatttgctgggacggttgccgtcttgccgtcgcgagaaactacacctgtgggcgaactgagcgatcgcagcgaatccatggtcttctcagcggcgtaatcctgatagacaccgacgacgatgttcagcccgatgacggcggcgatgaaacctccttcgatccaggactggatgccgaaactgacagccattgcgatgatgaggacctagaaattcttagcaatcattctatgatggatcttggcttctgacttaccagcatcatggcgttggcgatctgtcgaatgacaatcttcgccaaggagacgcctttgtctccttgaagcatattctcgccatacttctcgaggcgttgcttgacctccgcagttgttagaccatcgtccgaattggtctggagttcgctgatgacatcttcgaaggtgagactatgggcgggttgggagagaggttgttgtgtaatgtcaacatggctctcggagccggaacctttgtgcgacatttcgcaatatcggatggtagagtgttgtctctagttgggtgggttgagtgaattgagtgaattggtgaaagatgtacttctatgaggctcttaagggggcaacttatagaaggtatctgtaggagaatgagagtccatacaccgggattacttgagtaataggcacacttctatgaaacaaccttcttttcttttcttccgaggggggttctcaaagtataaataggatcagaataccactcgatggcgaaatgcaatcggcagttatgaccggatgtaatctgaaggaaattgtgtccgacatccggggaactagattttatgctggcgaatcaacttcatttaccacatctctgtatcaagcggacgaccttggcgcatcatcgatgacgcaaacggagtctaggcatgtccgggtgggtccccacacgacaattctcgggctctgattggtgcggaaattgcttggcataaccttggctggacaggtcgtcggtttctatctctctggcttatttcccacctctggtcttcttggctcttggcacttagaacctcttggcatttcggggctcgagggttcctccgcttcaaatccgcctctttctccggaggaattcttcaattcttacgtggcgaaacccccattatctttgtttttcgcctcagataatgggctatcaattgctcctggagacacggtgcctgaatacatgattgacccgagtgatccgatctaggttgcactgtcttacattgcgctattcctccattctcattgggtctactatcgggcgatactccaattctttatttttattttcttctcgtatcttcttcgcttgggcctaaaacccatatgaccctccactcatggcggacgattctatgccgcgagaggagatactcggggttgtgattggggcagttgcgctgttttccctgatcagcatgattccggtgtaagtacggaggcgcgagaagtcttggcaacccccgcgcttcatgcatgcgaattgttctcgaacttccgaagtgccgatcactgatttgtatgattttccgtctagcatgatcatgagacatcaccgacgacgcgccgccatacgggccatggccgcagcccgagttctcccaccggtatatcaggtacagttgcagaatgtgttgggccaacctgtgtccgtggaccgatggttggaagaacagaacgtgcctgccaatgcgcaacaatatggccaagatacttggtaagtgcgctattccagcattccaccggtctccgattccggctgcccctcctcgagccttttggccccgcggctggatgatgtcgtgtggggacactagggctgggcattcggtccctccgccctatcgggatccgcgagttttcgtggaggcggatccatggtttctgggcaaggcgttattgcgcccaaggccaatttccggtgttcctggataaacacgcgtggtcttggctagagatagcagaccgtgcaagcgactctggacacatcgactgaatcttctagaatcaagctaactcacccagccccatctgtctgtcagcactatcgtcgtccccatacctcgcctgtcccgatccagccgtgctggctgacgaccagcataatcccaacccgactacacgaccagacccccgctgcagctgcggggcacattccccgcccgatagcgaggtcctcgtactcaatcgctgcaagcatgccttccatctagactgtctgaagtcctggtttgaataccgtcggtataagtgtccgatctgccaagcttcgtattcgccagaggaggaggcacgaggatgatttccagaaataattattgacctgcatgcatgatcctgcggggttgcccaagtgcaacttgcatttggtcagcgatatgccctttgactatcggatcaatacggcttctttcttatatttttctcctttttctttacctcttttgtcttgctttgcttttgagatatccgtcaacgtgacacgacatgtttgttcattccgttctttgatctgcatttatccattgaccatctgtccaaagaggccgcagatgatcttgttttatgtatctatacgcagtcatatatactcgttatgatcgtgatgaaataggctatgtatattgaccgaatggacaccttcctagcctgttttcacagaaatgtatacattaaatcaccatcattgtactctcatcttctcatcgtccgcgattgaacaaccgggcacccaaataggaaatttatctcggcactccgcatttcccgtctctacggagacagcttctaagatattcctttttttaatttccctccacgatacaagaactccatgcataccaaggagtagcatcagaccctcctatcacacacatctcatcaaaaatcaatcaaatccctccaccatgggcttaaatgccaaagaaaccaagctcgtcgatatcgccagagataccatcaacgcaatcccaaggtcaagtacccacagtgtctccagcgcagccctctcaatcagcggccaggttttcaccgccgtgaacgtgttccacttcacgggcggaccatgtgccgagctggtagtcctcggtgtagccgccggagccgggactccgcgcctctcgcatattgtcgctgttggcgaagacggccacgacggaatcatcctcaatccctgtggtcggtgtcgacaggtgctgtatgatttgcatcctggaattcgggttattgtgcagaagggcgggaaggcggaatctgtccttattgatgagttgctaccttatgcttatgagcctagggagtgagatacgatacaattatgtgcataatggagatgccgaagtaaccggtgtggaatatactacggagtggcagtcaagccgatctaaaaatacatttcgacgaactaggctccatagttcactaatagcctgattcaatccaatcagcatagtcgcttcctagaaccgtgtcctttgtgactgccgccgatataggagtctcgtactcgcgcgcagaagtatctgacccggccccgctattgttgtactcataatagagtggtgtggcgccttccgctaatgtcgtccagcccttggcattgactatactacccaggttggagttctggtagatgacgcgagcaaggcctcgccatggacggccaagatagacagtgctatcgaggacagcactagacgcagccttgatattgcagcggtcgagtgcataccaggtggtgtcggtagttgtctggcgcgaactggcagtgatggccccagggccgttggagactatatcgcagttgttgaaccaggcggaggcggcgccgaagatgtagtccacggctcctagaaaccgttagtacttatagtgaaatagggatgtgatagagaatgacttaccctcgatcctgctgttggcgtagtattgtgttcccgacttggcgtacaaagtatcctggtatccactgaactgacacgcatagaagccgagtttatcggcattggcgacgagtctggtatagtcagtcaataattcaataccaaggcaaagaaatagatactcacgcaacagcctgcgcgcctttcccgaacccgttcaccacattgatattgtgcatcttgaacccatcggcgacaacgttcacggtagcgctcgcatccagtgagccagcctcgggcgaagatatcgtatgcgtaatggtaacagtgttctccttatatgactcctcatacgtcgtctcgccatacaaagtcagagcaccggcatagttaatagtaagctgttcctcgtacgtgccgcttgcgacatagatacaagctgctgctgaggaagagccgagagcagtaagtgcagcgccgatagtcgagtatttcccactcgatccgactgtcaggcaacctgcgggggcagtggtcctagctgtgcgggtgactagtttggcgggtgcgcccaggaccgccgtgctgagggctgcgaggaggaaagcgtgtagttgcattgagagaaattggtgttttaccggagagaagggaatggtttcgggttatgtactccgtccgtctttatagaagttgtttctccaccgggactttgtatagttatgggacatatttttccgagataaagagagatttcctcttcaaggggccaatatattcaattatatccacagtccaattcctatttgtttcacggagttccaccccgttgcgtagaagtggatattcagggcagatcgtagatcggggagaacaacgtgggaaagtcaccggaggataacccattgggtaattaaagggaatttatggaccctatatctgtttgagggtgaagaaatgactttccctcatggaattattcctcgaatggcgggccagggctaaagaagaggtgtttcaggtggttttatttctccgttgacgaaacattgaaactatccacatgcgaaacacttaataagagattagagaaggtaaaaggagaagagaagttatgaaaggtataaaactagaaacgcagttattccaatcatagctgcgataccataccttcaatcaccacgcaatgtcgataacaaaagccctcgcagtctttgcgcttctcggctcatctctcgccctaccagacaaagcaagacaccaccatgctcgcgcttcatcttgcacaccagtagcaggtggatcttcctcaatcgacgatgttcccgctataacatcagcaatcgcctcgtgcggcaagggaggcactatagtcatcccatctggcacaacctacaacctgaagagcacactggactttgcggggtgtgttgactgtgacttccagttggaaggtaccttgaaattcagctcgtcaacatctacctggaagggacagacagcaatgatcaatatcaagaacattgacggacttagattccgatctgtaacaggcagcggagtcatcgacggaaatgggcaagatgcgtacgcattcctttcctttttctttctttttaattctcatcccagtccactaatatcacatgtagatgggaccttttcgcaacagacagcacctacgcccgcccaaccctcctctacatcaccggcggctccaacatcgaggtctcaaacctccgccaaaaaaacccacccaacgtcttcaactccgtcaagggaaacaccaagacggcgaaattcctcaatctaaaaatggacgccacatccaagagcgacaatgagccgaagaacacagacggcttcgatatcggcgccagcacagacgtgaccatcagcaacgtgaacgtgaagaacgacgacgactgcgtggcattcaagcccggtgcagacggcgtcacagtcacggacattacctgcaccggaagccatggactgtcggtggggtcgctggggaagagtgccgaggacgtcgtgaagaatgtgtacgtgtccggcgccacgatggttaattcgaccaaggccgcgggcattaagacgtatcctactggtaatggtcatgccatgtccacagtgagcaatgttacttttactggtgttgtggttgatgggtgtgactatgcgattcagattcagagttgttatggagaggatagtgattactgtgtgctgaatcctggggatgcggacctgacgggcgttgtttttgataagttcagtgggaagacgagtgggaagtataaggctgtcacgggcaatcttgattgtggatctcttggtacttgtgatgtcaaggttagtgcttatactgttgaggcaccatctggggggagtgaggtgttgtgcgctaataccccgtcgactttgggggtaacttgcacggctggtgcctcgggctgagaataaggagatcagacctatgtatagttgagtgaagaaactgaaaagaaagttctatacaattttgcggtatataaaatgtgttcgtcatacatgtgtgatttctagcgcagtacaccagaaatcccgttctaatacttatgaggatgcaatcatcttgtccttcacgtaaaggtcgacatactggtcgacgtcgtagttctccagctgggagcggtcccagcccagcttcagcagctcatcaacacgagccttgtcaaagtgcgcctcgatgtgacgcttgtacttggccagaatctcgggcttggcctcctcgcggcggagacggtggcccagaggagcctcgacaacaacctcctcgaggacagtgccgtcgttcaaggtgacggtcagcgcgttggggatggtgcgcttggtggggtcgtggtagtcggtggtgaacttggggtcctccacacagcggatcttcttgcggagagactctagcagaggggaggtcgcggcctcggagccgtcagcgtagtcgcttgcggtcaggcggccgaagacgagcatggtggcaaccatgtactgcacacagtggtcgcggtcggcgaagttgtccatctccttgaactgcttgtcaatgatgcgaatgcatgcctcgtgtgtgcggttggtgatctccttgatgtccttggcgctcttgcccatggaggcaagcttggcattgaccttttcagcggcctcgatggcagtctgagagtggaactcggcttgaaggagttagttgttgtcaattttgtatagtgtcatttctgcaaatttaaacttaccagggtaggaaaccttgaacagaacgttctccatgacgtaactgccgtaggggcgctggaactggaacttcttgcccttgaacaggacatcgtagaagccccaggtaggagcagtgagaacggtgcggagaccaccctcacccctctggaccttgagaaccaggttgacagcgcgctggcaggcgtcaccggcagcccatgacttacgcgacatggtgttgggcgagtgacggtaggtacggagagactggccgtcaacccaagcctgggtaatagcatcggcagtctgcttctcggtaagacccaacatcttggagacgacggcggcggtcgcaaccttgacgaggacaacgtggtcgaggccgaccttgttgaaggagttctccagagccaggacaccctggatctcgtgggccttgatcatggcctccaaaacatcatggatcttcaggatcttgccgttgccgaggtttccgccggcgcggttggtacgggagatccagtcagccacagccaagataccaccgaggttgtctgaggggtgaccccactcggcagcaagccagcagtcattgtagtcgagccagcggatcatagcaccgatgttgaaagcgccattgacggggtccagctggtaaggagtgcccagcacacgggtaccattggggacaacagtaccctccacaacggggccaaggagctttgtgcactccttgaacttcagagcctccaatccacagccaagggtgtctaggaacaccagacgagcagtgtcaaactaaaaatttagaattagtcggtgcttaatctaaccgggccgggtaaacttactgccaagtcggaatccaccttatagtcgtggatgtaactggccatgtcctgaatttcagtgtcataggacttgtcggtgtgcaccgccggggcggcagattgacgagcagccattgtagagaaacggggagtgcgaggcaccgagatacgtggagagatggagagggaagaagtcaaagtgggaaatctggagatgcgggccaaagtgcggggagacgtgtgggtcaggcgtctcactgcgggcaaggacatagtgaagaagggtttggaataggattgttgatcaacaattgacacaattggagagacgaagagggggagatggtcagttatttaaaacaaatcatggacgaaaggagaaatgttggggaaaaaagggagagaaaggccggggatgtgttccaagctgacttcatactgccgagggtcggttacagtcgggtattacttctctctaccctttgtacaggcctttgtatgccttcttactctttgtttatggggttgactaccttgtctacagacggtagactgataattgcactattactttttcaataggccgagttgattgctatgttaccgtcgtttgagcttcctggccaaaatccgaggatcggacataaaaggacagcaacagaccaggatgcaagatgtagcgaacatcggaatatacggtccgaatgtgcaaggaaaggacaagccaaaggagcaaaaatgttgttcgaaggagctcaccccgagctcatctggaccgctgccctcggctgatctgcgagctcacgtgcagatcatcaccccagggggccttccccaatccccaatccccaatccccaattccccaccttttctcttttcctcctttctgtcgtcaccatcactctaggatatcagtggaatattcccatggcctcttctgtatcagttttatacagagacttgacaatctctccatagatagctttggcaaagagcgggggcacggcattcccaatctgcttgcgcatgaatctcccagcgaactggaagtccaggggaaatgtctgcaacagggccatctcacgactggtatagggccgggtacccgaggggtggtagttgtattcgccacctccgcaagtaattgtcctggctagagaatggcgatcaaaagacggtcggtggctcaaagcccaacgcgccagtgccgcttcaacgttgtggtcttcggcatcgggaggaatgttgtcaatcgtggatgaaatggtctcacgcggacgtaaaccgtgaccaggcatgccgtgagtgggttgcgcataatgtggtagagcttcaccgggtctatgaacacgtggttagatatataaaattggagtatgaaaagcatcgtctttcacttaacttaccccgcagcaataagaagcagtctcttccgctcctgaggcactccatattcatcacagcccagcaccgaccagcgaacggaatatccaaactcaaccatgtccaggacaactcgattgaagataacggggaatcgttgcggtaaccccatggtttcctccatggtcaacacccggggacgggactcccgaatcagacttccagccgaaaatacgcacgccgagttagcgtcatcacgaggacagggcacagtatgagcaggggaccaggtttggcacggaggcgagcagtgtgcaatatccactcgcaggaatttcggatcgttggtaagaaaactgaaaaagtcggaatgctcgacctctacatcgtcaaaattcagctgatatgtttctagtgcatgcttatcgatatccacggcccattgtagcttgacgccggcctgcttagccccgcaagacacaccaccagcaccgcagtatgcgtcaccaaaggtgtatgcacgatcagggacagtcaaatcaatcacaccctggcgttcaagatccctagccatggaagacaccctagcctcgccgaaaggcacagtgtggcctctccattctgcacgcagctggttcgcgcgctttccaagtcctggatctgattcggcaaaggtcagccattcaatggcacactgctctgcacttaaaggtgcattaccaggaataatgacgactccattctggcgaatggtgagcttcagtcgacaagtcagttcatctcccggtgtgaggttattgaagtcagtccgatagttggtgaagcgaatggacacaacccgcctaactttcttgatgctgataagatcggtcttctgagtgagccagaccaattcattgttaagttttggcaaatatgtcttggcttcggggtgcgtggtgcggtagagatgccgtccgaaaaaaagcagatcatgaggctgagggatcatgtccttgacacgcaggaaagagccgtcttcaagctccagagatattccgggtttgaacacaacacccccaatatctatttcttgctgcattgtctccggtgttgggctgcagctggcggactggttgctgatgagagatgagttgccagaagaagaccggtcactcgctaagtcgtcgccggcgacaatgacggaggcagccccaacgtgtgtcatttcagaggtcaattcctcaatggcttgattggtctcatcatcgcaggtgaggtcaatgacgatctgcaatttctcggtgggctggaaggtgtgactggcctcctgcatgggtggagtggtatagatcgccgacggatccaacatgatgatatcttcgtcgagcattgtccgttcatgactgactgctcggaattctgcagtgctcacagggactgggtctccaaagggagacactgaaatacgggatcgatcattgatatcagccatcgatgtgatggttgactgatgaaaatgttccatattcggctcggatgatgctaaatccggaatcttaatgaatgcgaagaagatgaagttcgatttaaaccgatgaatgatcttagagatcttcttgtaaggtctttccggtatggtctcacgttcggatgagttggccttcagaaacacttctatttctatagccggttcagacctaacccgcgcaagtgatcacaactgatttgaaggaatcgcagggtttgccaggccttctatacataacaagtccaactgaagcaacgcaaatttgtctttgtatttctatttggtctacaaagcagagatgatatctagctctgtgcagcatgaaagactggcatagagccatggtattcattttatctcattgaaggtccgcatagctgttccaatctggtttgtatactcatctatggttgtatgtcaatatcaactctatagacgcttagcccgttccggatagtagggcatgcccggggaatgcccgggcacgtgcccataggccattgcttactcatatccccccgaagtcggcccggacgaccacgggagggaagagaaaatttctgtgggcaccgaagaaccacaaccgcaatggaatattttcctccctctctctctctctcttcttggggtggtgttcattttcagtgatcaccattctcttatcttcactccttcttttacgtgatctggtttaggtaagtcgcatgatttcattgttttcagctactttatgcaaagctgcccctctgtctcttgtgatgaattatggtattttatagatgttagacttcctaaacaattgttgcggataaacacctggactgatttgagacacttcaatcttgctatactgtgaatgcgatgtgaacactggtactaattgtcttcgtccattgcagaaaacctactcttcgtcaggatgtgtggtatcattgcgctgatccaggcgaacccctcgtctgcggccgccgtggatctccacgaggcactttaccttctccaacgtgagttccggccagaatatatatacctgcgaccgcgagactaaaggttctggtatcacagatcgtggtcaggatgcagccggtattgcgacatgcgcatccggcggccggatctaccaactcaaggccaacggcatggctgccaaggtcttccaggaaggtgctaaggtttccaacctccccggttccatgggaattggccacctgcgctatccgaccgcaggatccagtgccaacgccgaggcccagccgttctacgtgaacagcccctacggtatctgctttgcgcacaacggtaacctcatcaatgccggagacctccggaagcaccttgaccttgaagcccaccgtcacatcaacaccgacagtgacagcgagctgatgctcaacgtcttcgccgatgagctcagcgagaccaagaaggcccgtgtcaaccacgaggacgtctttgccagcttgagtcgcatgtacaagcgttgcgagggtgggtgggcctgcactgctatgcttgctggtaagttgtgaatcactcctgctgttttctagtctatggccctaactcgcgactaggctttggtatcttgggtttccgtgactcctacggtatccgccccctcattctgggctctcgtcagtccgcggatggacccggcatggactacatgatggcttctgaatcagtggctctggatcaactaggtttctccgaccaccgtgacattaagcccggtgaggcggtcatcatcgccaagggtggtgagccggtcttccgccaggtggctccccagaaggcctatgccccggatattttcgagtatgtctacttcgctcgccccgactccgtcatggacggtatcagtgtgtaccgtagccggcaacgcatgggtgaccgtctcggtgcacggatcctcgaagtcttgggtcccgacgttgtcaaggacattgacgtggtcattcccattcctgaaacggcgactacgtccgcgaccaacgtcgcccaatatcttaacaagccttactgccagggtttcgtcaagaaccgttacgtgttccgcacttttatcatgccggagcagaagacacggcaacgtggtgtccgccgcaagctcaatgccatgaaggctgagttcaagggccgcaacgtcctgttggttgatgacagtattgtgcgtggtactactagtcgcgaaattgtcaacatggcccgggaagccggcgccaagaaggtttaccttgccagctgcgcaccggagatcacacatgctcacatctacggtatcgatctggcctctcctcaggagttggttgcgcacaatcgggactccgcggctatcgccaagcatattggcgcggaagcggttgtcttccaaactctacctgatctgaaggatgcctgtgcttcggttgcccgtgagaatggtcaggaggagcccacaaactttgaggtcggtgtcttcagcggtagctacattacccctgtttcttccggttacttcgagcatctggaggccgtccgtggcgaaggccgcaaggtcaaggctgttgacaaggccaaggaggctgtcaccaatggctgtgccaacatgaccgacttccagattgccgcgcatggagtcactatggacaccaatggcaagatcatccctgccattgacaacgagtcggccattggtgccggcacgcagaccagcaactccgaagaccagcagaaccctaaggtctcggaccgcatggacatcagcatccacaaccaggctgaccatgaggcatgaggcattattacgagacatctgatttccattttttttaaatttctttttctctaccgttctggtaacttgcattgggtatttgggcgtttatttgagggagcatgtttgctgagtggctgatttgctactgtatgatatggaaatgatgctcaaagcattgaaaataccaagacccgatgtcttgagatacacttgtcaataactcttgatgaaacaaaaataaatgcaatattcaatgttgttgaaatgctgttctttcatcgttggctgtcccaaagaggcaggtcacgtgcccgtcgttggccagtagcattccctccgcatcatcgacagacccacgatgcgctcatcggcatgaatcaagcttagccctctgttcggttgaaatgaattgatacgtcttgttatatcgggactcgtatacgttgcttcacttgcaagattgaacgaaattgacgctccttctctatataatggaacgccgcattactcgttctgcagcccgggctgccactgcatggagtgcgggagaaaacagcccgtctgtcactcaaccaccaaacactactaaagggaacaaacgaaagcgtcgaacccccaataaattgaatacacccataattcaaacagtcactgaggtcaaatcctccaatgattccgatcctgcagttaaacaagaaaaaccagtgttgcctcctttgttcgatgagctccctcataacctagggccaatgccggcccctttgtctgtagcaacacagcccacagcttcaattactggatctgacaaggaaaaccaaactttagagggcaaccaaattggcaatccgtctactgagttccaagacactgtgaacaaagctacaaccaagttgaagaaagaacccaaggttcaaactacccaaagcggccgcaagccaaagaaaaatacttatggcttgacgcccggtatctctcctttccccgaattggttcggcccactgccgaggagtgcgaagatgtcaatcggctgttgtccagtatccatggcgtagtcactgctccagcaaccattcccgagccatccctgacagtcaccgggtgtggtgaagtcccatccgttctggacgctttaatcagaactcttctcagcggtgccaccacgggcaacaacgccgccaaggcctttggtgggcttgtgcaacgatttggcattctttcagaaggcatcggcaagggaagcgtgaattgggatgctgtacggcaggccacagtgaaagacgtgtttgaagcaatcaaaagtggcggattggccgacatcaaaagcaagaacctcaaggcaattcttgacatagtccacgaagacaaccaggcgcgccgagccacattgttagattctgagtccaagaatgactcaatgtccaacctggcgcctgaaaaggctgaaaaggacaagcaatacgagattgcctgcgcagatcagaactttctctctctcaaccacctccacaatctcaccagtgaagaagccatgaccgatctgatcaaataccctggaatcggacccaagacagccgcctgcgtgatcctgttctgcctccagcggccctgtttcgctgtcgacacgcacatcttccgactctgtcgctggctcgggtggatccccgcccgtgcaaacgaagtaaccgccttcagtcacctggaagtgcgcatccccgaccatttgaagtactcgctccaccagctgttcatccggcatgggaagatctgcccccggtgccgagctgctaccggccagtccagtgctggctgggtggatggatgtgtcattgatcaccttttaactcgcgacggcaagcgcaagagcaatggtccgactatggtttctaaaaagaaggctcctgctacgagcgcggttggtaagcgcaagagaatgagcaaggactccgaggaggagactgaggaaagcctgagttcgctttccgacggaacaagtgacgagtgaatgcattatgacaacgaaattatgtgaagtcaaggtggaatctttacgaggattgatcgtatcaatctatgacgacgaatggcttaagccgaatatttactctatatgattatatatttaccatattgctataggtctcaattcaagtgtgttattattgctaaacacaaagatcaattccataaatcaagtctgatatttcctagatgatcgctggtctacctatgttgtcgtatagcacaagtaccccttatcgccttatcgtaaacacgaaaagtcaccagaaactccctttactcccaacaacactttccagttgtccaattgcaccaattcccgccatgggctgtctggcatcccacattccgccctcgctgcgcactcttctggaggcctacgcgcctcccgggtcggtagagtacgccccgcacgtcggagtcgcgttgacctcccttctcgccgtgtacgtggggtacctctacatccaaagcttgagagaggcagcggtcgttttcaatgttcctatcccgtccgaaattcgcaatagcaggtcaatcaagacatgggatgaggttcaggggttgcagaaaatagtgttggaggatcaagctcagggagtgagttaatatgcctggtctttcgcttgggatcctttccttgcggtttctttttcttgttcctgcgctaattgcccttccactatacagaaatggaacaatgaattgattgtgagctactgtcctgccgatgggagggtgctcggtaacggaatcaagcccgccacggttgaagatgtcaacgaagttgttcgggttgcgggagctgctcaaccggagtgggcaaagactacctttgcggagcgcagaaaggttctccggacattgctgaagtatgtggattggcatatttgctccgccctatgaaactattgcgctttttctacgtcacccggcgaagcttccaactaacacctcgcagatatgtcctagaccaccaagaagacctcgttaccgcatgctgtctcgattcgggtaaaacaaaagttgacggctcattcggcgagatccttgtgacagtggagaagctcaagtggacaatcgatcatggcgagaaggcactgctgccagagcgccgaccgaccaacttcctgatgatgtacaagaagaacacggtcacatacgaaccgctgggcgtggtgggtgcctgtgtatcctggaactacccgttacataacttcattggaccgatcatcagcgcgctgttcaccggcaacgcagtggttgtcaagccgtctgagcagactgcatggtccgcagtctacttcctcgagatggtgcgcggcgcgctctctagctgtggccactcgcgcgatctggtccagacgctagtctgtctacctaatgttgccgatgcattcacctcgcaccctgatatcgcgcatataaccttcattggatcccggcccgttgcccaccacgtctgcacatcagcagccaagtcactcatccccgtttgtgtcgagctgggcggaaaagaccccgccgtgatcctggacgactcccgcactctccgcaatctcccttccatcgcatctatcctcatgcgcggtgtcttccaatcatccggccagaactgcatcggcgtcgagcgtatcatcgccctccccaacgcatacgaccgactcatcgaaatcgtaaccccacgcattcaaaatctccacctcggctctgtcctcctcgacaccgcaaccccagacgtcggtgcgatgatctcgccagtatcattcgccaacctcgagaaactcatcaacgaagccgtgcaacaaggcgcacgtctcctcgccggcggcaccgaacacaaacacccagtccaccaacacggccactacttcacaccaaccctgctagtagacgtgacacgcgacatgcggatcgcacaaacagagctcttcgccccagtcttcctaatgatgcgcgccgagtccgttcctgacgcaatcgccatcgcaaactcaacgccatacgcactaggcgcgagcgtcttcgggctccaacaatcggacgtgcaagcctgcgtgtcaagaatctccgccggcatggtagccatcaacgacttcggtgccttttacgccgtgcagttgccgtttggcggcgtgcgcgggtccggatatggccggttcgcgggcgaggagggactccgtggtctgtgcaatatcaaggctgtttgcgttgaccggtttcctacgttgattggcactgggatcccgccacgcgtggactatcctatccagaaccgggcggacgcggcggacgcgaagggtggggttgcggcttgggagatgtgtaagggtattgttgagatggggtatgagttgacgctgggtgggcgtattgctggtattctgcggttgttgaggaatatgtgaggtctgttctttggaattttcaaaaatcttgtttcatatcgatcttttgtactatacatagtccatcttgcttgagtgatatctctagctatgggaatatttgactcaaagtgtattcatacttcacatctatgcatatctagaaatcttgttacttcgccaatctaaaatcagggtataacgctaacaacaaagtcctcataaactcggaacaatttcacggaggaagaggagggccgaacttcttcagccagtgatcctcagtccggaacgaactctccatcatccaattccccaatggttcccggaagggttcaagaacctcatcgacaaagcgcgagccctcgagatccaggatatccaactgaccattacagaacagctgaccagtcgggaaaccatgagcatactcaacctgcgcagggagacgcagcaggaaatccgacaaccagcgcgcaaacttcccattcatctcgttgtaggtatttgggttcgtcctcgcaagttccatattatcgacagtccacttcgtgatctcggatgaccagctaggcaaagactccgcactagcacggaggagagcctcgaagaaagccaagttgaggtgtggcttgtcgcggccgatgcgggtcacagcgaggaagtgctcggatgggatggtatagtagacgccgcggccctggttctctgatttgtagcggcagaggaactcgtcgattttgaggagggagatcatggcgttgaagttctggtgacggattgcgttctggattccttcgtgcagggctttgcggtcgacttcggtcagggtcgagggcgataattggccctttccatgggtccaattgcacgaggtcatgcgcagcatctccaggaaagcaacgtcttctggggggaaaccgttgctgcggccgcggaggagatggggtggaaatttgcacaggtccagtgcgggcatgttgacggtcaatcctacatccacacattgaagctcggtggtgaccatcggcaggacatggagcgtgtaatcatggatccctgtcgctgcgttcggggccatccggaagaactccgggggcatgcaagcgatttccctcatcggcccgcccttcccatggaatacgcggacgctgtcgtccttacgcgctatgaacttttcaagggcagcccgctcgctttcatccgtcacgataccggcgttgatccagcgacggtagatggtgaggatctgcattgttggaacctggtcgcgcacgcggtccacggtacaccacctgcatttgaagacggcttcctgtaagcgggcgcgctcgtccagtgtgaggggaacgtagtcgagcgggaccatcatgcggtcgataaccttgctgcgggggttttcgagcgcatcgttccagaacgcaagaaggatgagagcgcggtatatgtgttcaccggagagggcgcgcgataggaacggcgaagctcgagggaagttcagattgagcgagtgtaggaagatctgctcgatgatctcaacgggcagggcctctaggagagacaacatcctgcgggaagtatgcgggcgcgagattctaggtgtgggcgaattagaaggacggtcataggggctcgatctcgaccgcgaagaccgagatgagctgctccgaatcgggttcttaaaggtacgacggcgcttcgatttggggatagcggtagaatgcgaacttgcgggcataggcggagccagctttctccgcgtcacgggttcatcttcgcgttttggtgggctcatggagcaattgaacgttcgcactatctggggtacatcgatctgtgagcttgaaccatttctgagccgtgtagggtaattattcagtgttgcagtatgtttttcgcatatcaactctagaaagtatacaactttgcaggccaagtctgtaaccccgtctgattggcggggcagagcccgacaggtgttagggctggccacttgagggctggaaggtcacatggtatcacgtgatggctccccactctgttcctaaatcgggtctagcccgttatcaaatgacgtcaaggtctatcagcaaaagaaaagttgttgaacaagaagaatgtcattccgaagggttcaacatggttaaattagaaatcagacatggagacattttaaaggctagatggcccatttaggatccaccaattgccccacaaagccagccttgtcgaaagattctgcactttggaataatccagccgaaatcaaggaacagcctggtgtcgatgtcgaaatgacggaatgatcgttggactgcccctggtgccttgtgtatccaatttggcgattgcaaactctcactccttttctctcattcctccacaaaccttgaattctgtcatagcttccccaactacgtcaccggcgtctgcaccttctgatctctgacgcctcgcaagacaagcttagttgcatgaacttgtctatcaatcgccctttccggacaccacttacaccacttacgtatctaaacaggaaattatcagtccctgtcttagatgatcaccgttgccattcttatttaaaccaccggtccatctacgttactatcttcaatatgcaccctttcagtgatccaacagtccatacacacgcctcttccagctcagattctactctcagctccaaaccgagataaacatcttcatacaaaacaaccaaacaacaagaaaactttcatcttcaatatgggttgcgtcgtttcttgcgtatgcgaaccacatctgctttctatgagatctcaactaacatactgcctctagatccaaagcgtcttccgcgccatcggtagctgcctcatggctatcgtcaatgccgtcggctccatcttgcacgccatcatcagcggcgtggtcacagtgatcgatgccatcatctcctgtctgacctgcggctcctgtggaagaagtagacgaagtcggcgatcagcagtctgataggaagcagaccatcgtgtctgtgtgcgcctcttgagtccatggggataagagggctggatatgggttctacgattgttatgccagcgcggattttcttttgtcattataccttcttggagtaaataccccatggcgcagtttttcaattgcgaattatgaatcaaattttaggttacgaaatacttcacctctatttacattgctctcttccataaatgatgtgattgtagaagatgtgtgtacgcatggtaagtcttgaagtatgaattcacattggtgagtattattctcaaaagcaagtatatcaactcccatcttctagtggagacgactcgacatatcgcaacaaatcccgctttgcatctgcgggtatatcaccccaacgctcattcaagataacatctgcgaacggatcctcaggtccactcccatagcgccggacaagggaataatgtgaatgctgtaacggccagcgagcagggacacgacaattcgcagcacggaacgatatttgcagcaagcgacgaaaaggctcgatcttgcgctttcggatgagccgatatgtgatacccgatgatcggtccggcctggcctcatcctcgtccaggtaaaagtccgcagaaagcagctgcaagaactcaaactgcgcatctgaccagggcgagcgcaagaccttgtccggaatacggccaggtccaataggcactgcgcacggcagccggaagaggtcgttctcgtggtatatctcgtgtggtttgcggatctgcacagccccaaaatggaaccagattgccactttgcggtcgacagtgcggtcgacagtgcgcgacggggtccgtgaagtgtcctccagctgtgcggggatcaccaaatcgcctttcccgcgccggccgagtacggcccagtcacaggcttctaggttttcgaagcgtgagtccagatttgagagcactgcttggtcatccgggtggaagactaggccggcacatttgcgccggatggtatgcgcaacgtactcacgctggcatttccggaacagggggagtgtgcaccaccgacatgccagcaggtcggtctgtagttgttggcgctcttgccagggcaaggcccagaagtccaaaggtgggggtaggaaatccggggtaaagaatccctctcgcgagcctaaattgggactgctgaatgcaagccgaatgagccaggtgtagagcaatggattggacagggcttggctgagacgtggggaggcacgagggaggttcacttcaagactatgaagaaagatcaattgcaggatttccacgggcagtgactccaggcgcgagcacgggtggtcggccaatggatcagacgggcctgagcccatttgcaacgtgcgtctaaaggtgatttgttattatatggcttgtatagctttttcgtagcaagacggtgttcacttgtagaatcacacggtatttttatggtcgtgaagagtcaggaggaagagcagaaacggatatggtttatctcaatggaaacacagtccatatattgactgcagacttcgcataatgttgtcctgtagctcctcgtgactcataggagaggcgcttgacaacgcttccagcgaagtctcgaatgaaaagagcaattgaaaggaaaaacccggcccattgctgggagaggggtagggcccaggggatgtgggtaaactgaggtgagctgcgtgtcttggcaaggtcagcttgagagctcgtcatcaagcgagattctgtatgtggcttaatcgtcagtgcatctaatcagattggaatagattgctgctcagtatttcttgtcagagttgcaaaaagacccgtttttcgcatgatacttagctatatatcctccttcactcaacctgctaagatatatatcggactaacaatgtttattgccttgttttctaaaccaaagcccatttctcgatcaattggtttaatatctggttgaaaagtactagattacagtagaatctattaatgaacgcagaaacgacaaatgtattgtttctatacacatcccaactgctccaccacactatcggaggtatctgaccacacactggctgaatagccgtcttcttggctccaaaagtcatgatcacgtagtgcaatggagcgaggaataaaaaggcggatttgaggccacaagagtccacgcttaaacggcggacagatcgccgaagcgctcctacataagggaatggtataagtatcgaaacagacgcattgttctcagcaagacagtcaacacataccttgtagccagggggcatccacttgcccttggagacgagggaagcggtcttctcgtcgatctcgggctgggcggcggcaacctcgtcctaaaaaagcaagcatgtgagtaatggtcccaattctgcagtctaaagcagataatacgtacgacagtgaggtcctcgaagggacgggcggtctcgatgttctccagggtcttctgcaagttctgcaactcagcctcaaccttacccttggtagcctcggcgttctgaacagcctgggcctcgaaggcgtcaatggccttgagctggcggttgacatcgtaggtagcgggcttgaaagccttgaagtggttctcgagctcgtcgacgatagcctggttcttcaggatgccgcggtagtggctgaagtcaacagtctggggttgctcggagaggacctggaccttgcggcgagcctcgtcattgcgcttcttgaaagcttggagggaggtagcggtctggccgcggaggccgagggaggtcgacaccttgacccagtcgatcttgagagcggcgctgcgctgttttcgggtgaagggagttagcgggagtcatccagacgggttgacaaggaattgtcataacgaggagcaggagcgaaacatacagcagccattgtgacgggtatgatagaggttgggggtggggagaagagaggggagttcaatgtgcagggagttgccgaacgaggagcgaccggaaggtttggattgttcaaatcacgtgatgtccattccgaaatccaccgtgtattgtataggcgacaaattataaagcgatcgtgttaattcttgtaaattacttatagacagcttatatctttgctcactaccaagttcagattgattaattgactcatccgcgggttcaattgttttttgggctaaattgtgtacactatgggcgacaacatgccagatatctccatctggaaagcataacccaagtccctcgtagaaccttaaatagggtcactcgttatatgctgagagccatgatggagttaacgatatcgttgtcgttctcccgaagagccttgacggccttcttgcgggacacgtttgcttgtgccatgaccagctcgatatccttggactcaaggttggtctcatcgacctcctcaccatcatcctcctcgtcctccttcttatcctcggtctcgggggccttgcccttgccgagaatctcctcgtggtcgtgaccggcgtggtcgccggtggcctcggaggcagcgagctgctgggcggcggaagcctgggcctgggagttcaggtcctcaatcttggcctcaccgaagatgctaaaaggtgttagtaaatgtagttcacggatgagcgagtctaattgggttccacgtacatccagcagttgctgttgggggaacggtaaacctcgggctggttaacaacgaagaggatctttaattccaacaattagcatctccatggtcagaatatatcgagttatttcatctcgttggtagcaagtgttgcgcttcatggtcgcaatcacattgtacttggcggggtagaaaatgtcatgacggtcgcatcgggatcacatacgttcttggggcggcggagagtgacacgggtgatgccagggacgagcttcaggccgagcttgccaatggccttgcgggccttcttctcaccacgagagtggatagcgacagcggcaccggcgggaatgttgggctcatcgccagcctcggagccagactcagaggagctctcctcgacggtcttggtgacctcgtcatcgtggatttcttcaacgcggggatcagccatttttgcgatgtaaaagggcctaagatgaatgcgaaaaagagttgattagttgggttggttggttcggcaatgggtgtcagggctggttgaatggtgtgagagcgggcatagtgggagagaatggtcaacccccccacgaatcgcccacaccaagggaagggcggaaactgatgttgaaaagtcgataattcagtcgagtaaacactcatacatacctgagaggtaaatatcaagctgttgggagtggggatggattttgttgaaggtgaaggtgcgtagctgtgcgccagaccgaacccgaaaatcattagcgagcgcgcgcccccagactgccctgcacacattgccctatatggaactacatcaccaattccaaactagattggctaatcatttatagatcccatctagatcaaaataaatatatgaataatacagttaatacagtttgcaggtcattatttacgtatctgctcgttctattctttttgtagagccagaagttcaatattccccgttggggggatataaaaatgagtccagagccagaggtaaaccaaatgacaaaaggcccctttgccgggatatcaaggattttgaatcatttttgctgttcattgatgatgcatacagcgattttgccagagtattaccagcaatggaaacccttccaggacacctccttcaaacccatgcaccgaaacctcgtaaccatctatgacttgttggcagcgcgagccttggcgtgggacttctggacctcgtagcgagcctagagtggtgttagttgaactgcttgtaattcccccagattatcagatcgggtgggcccaggcgcattcatgccagagcgatccccccatttcaagatgtcgaacgtacctgcttgcggaggcgcagaaccttgaagcgctcgaagtcggaaaggttcttgcggcgctcggagcggtcggtgcgctgagcgaaggtgctcttggcccacttgccatcaatctcgttcttagcccaaagcttcttcacgggaccggtaccggcagcacggggaagcttggggatggtgaagtgagtgagggtagcgtgggcgagggggagaacgtgacggggcacgatcttctgctcctcggtggagggaccgtcgaccaggacctgaacaaaaaaatcgcaagtcaatacacattcccagtcttaaagatctccgaaaatcccgagtccttcgatttttgtcacgatttccggattcagagggcgattccacatacacggcggtggtccacgatctcaacgatggcagcaagcttgccttcgaaggggccgctgcggatcagcactaggcggccaacctcaaccagcttccacgaagcgaccttgacatcgatatcggccatggcgaaattctgcgggacgaaaaattcagcgtcgcggctctgtaatatttgtagattgcacactcacggtcgacagggggtatgagtcgagagggggttgtcgaaagagttcaattgtccaagagttgtctcgaaattcggatgtgcccacactcgcaacattctcgcttaaccggccacttgcaggtctagggttctgattaggtcagcatccgcattaacaattatccgagcccgtgcatttatctagtttttttttgccgcagaacttttgttgatctctttaagctacccagctttacaagctccagcctctgatgatgagtctgcgttgctttcagtttcgacaactgctcaaatgtagcatttactaaggtatgctcatatccatattttcccctcgttttccgttcttttccccctcattcctcatatgatgccgtaatttgcgattgacccagtgtctgtgaggccctcgccggggctctctatacagcactgtcggatgatattcaatttcttacatattctgatatggattataactctcacgttatattgtcaatgctattgagagacatcgcgctgactgtttcaagatttaggacatctgccttgatatacaaggacttcttgacaacaccgcatctcttcagctttccacagggtacgttcatacaatcctccattcaacacccccaggtccgatgattagaacattttatcacgcctagatagtaattgagcttctcgctatgaaattacctaactaccaagatctctgagaacctatcaccttgcacattattgcttgttatgctggttgtgacttgtcgctaaccttcaaaagaatataggaacttctgtgtcagtctggcagtttgctgtcttatataccatcgaaatgaacaatatattagaacaacaccttgtccatcagtagttcagttggtaatcttcctaaacatccatggataacttaatttacctcggttcatccatgttgtactccgtaaatagtacatctacaaacacctcggtacaaatgcaagtagttttgattacaataagtcgtgctatatcgttacctcggccgtgcaatgccccagagcaagccatttgtcccttcatgctatgccttcctaccaacctagtctatctctcccaaatagcaaagagcaatccttccttgcccttctcgacctaattatgacgatgcagagccggtagatgccacagatgacggtccctcgcggctgagcacccacatgaaaacgaactgaaccgcgtaggagtatacgaacaagaactgaccgcgtcggttgcgctgggaccgggccacagcctgcatcgaaccggcatgcatggcggaatcggtcgaatcggggagcagcacatatttgagcgagcgaagctagagtttagacattagcaaatgcggaacgaattgaaaagcgataaagtcgtcactcaccaggaagaacgcattggccaaaaatgtgtacgcgaacaccgtccagccaatccagcccctagtctcttgtccggggttgaagatctcagagacaaccatggtgacaatgattccaacaaacttgtagcccgagtacgccagcagatccagcagctgggagtcattgttgatgctcaaaatgtaagtcgccagcttcaagcagagaatctcaaatgcgatcactgcaatggccgtggtggtgatcgaaccgagaagctctgggtggaaatcgcctcggaatccagccagtaacaccgacagcagaatatatgtgaccagggccatgacgggaatatacatgtccggtgagttcaggtcgtcgcgaggaggcaagaacatggatgagtattgttgctgtatgatttgaccacctggtccagaagttggagccatccgggcttgctgtcgggaccagggcttgtgtcgccaagggaagaggacaaggaccagcttgttcaggacgtaggagttggagacgttaaagtagtgcttgagagcgggtatagagacatagcgattgaactgtagattatctccaggttagctataaacgatagaaatttgtagatgatgcatacgttattttccatgtactcctgtccagccgccattgcgcttttgccgacttggaagcccatctgagccgtgggttcgttcatgaacccgccgaatccgggagtaccatagccaccctgagccggtgacggttggtacgggttaccgccatatccagcactcgggggttgctggggagctggtggtggaggtgagcgcatcatagggacggtcgagacatgttgtgggacggggtgatgaagaggcggcgattgcgcgggtggcggagcgaaagagccccgatacataatgcacctgaatagggaacgaagataggagggaaaatgagcgtggaagttcggtggcgaacgtgtcgtctagatcgtgtgacgggggtttggggaagaagcgaagttgatagcggagggaagtgtttatacgtggctgaagatccaatccgctctgagctccccaacttcgcccgttccgccaccaacaagtcacaccgggctttttttcctcctacatttattatctgcttctcacattcgccgatcaattgccggagatactcgaaatgttggaggcttttgaaattttaaccacatcgggcgtggtgctttggtctaaggcctacgctccggtgggcgcacatgttatcaacagcctgatcaacgatgtctttatcgaggagaaggtcgtgccgcagaatgctacaactaatgggatctcgccggcatacaagaaggagaaatatacactgaaatggaagagagtcaaggaattcgatttgatcttcgtggtatgtctgtcgcatgcgcatgcgctcgctgcttcgactaactctgggtttatgcaggccgtctaccaatcgctactccaccttggctggatagacaaacttcttgagaacatttcaaccatctttattgatctctacaaggaccaggtgaagggaaaccgcgcgagaatccagacctatcggttcgatcaatactttgaacagcaagttcgggagcttgaagacaacgctggtggattcgtagaagaacatgtgccagagacgggtgaaaagaaagacccgcttgtttcgtcggacaatggaggcccaccgccgccaccggtgcctggcctggtgaaaggtatggaatgacaaaccccagttttagtttcaagcgcatgctgaccatcctaaagcgcagcccagagctgcgctagccggggcgacctctgatgagggtacgccaccagctacaccagaaatttctagatcttcgacccctcagggtcatcttcttacagccaaagccgggcctggaggtcgtggctctcgacgttcccgcaaggctgccaattcgaacgccaacgcatcgtctggtgatgaagcccggaagggaaagcctgtcaagtcccctgtgaagaagatgcgcagatgggatgctagtgggatggcagatgaggatgacggagaaatcctcgattattctgcccccgcggaggaaggagagaccgtcgcccctgcggtggaggctgtctccgaggaggattggggtcgtcgaaccggcaagggccaattcgtgctgaaagagttgggcgaggaagttcaatccatcttggaccaagctgatgctgaaaagtccaaaggtactgcttcgtctggtgtggttggctccgggttcaacgcaattggtggcttcttccgtaacatcgtcggaggaaaggttctgacagaatctgatctcgagaagcctctcaaggcgatggaagaacaccttttgaagaagaatgtcgcccgtgaagctgctgtccggctctgcgagggagttaagcttgagatgattggcaagaagactggcaatttccagagtactgatgccgcattgcatgtggccatggaatcctcgctgcggaagatcctgacaccgacctcttctttggatttgctgcgcgagattaacgctgtggtcgctcccaccaccaagcagcaggcgcctcgtccatatgtcatgtctattgttggcgtcaacggcgttggaaagtcgaccaacctgagcaagatctgctacttcttgcttcaaaacaagtaccgtgttcttattgccgcttgcgatactttccgttccggtgccgtggagcagctccgcgtgcacgctgaccgcttgaaggaactgagcgttcgtgaaaatgcaggcgatgtggagatctaccagaagggctacggcaaggacgcagccaacgttgccaaggatgcagtcgaatacgctgcggccaataagtttgatgtcgtcctgatcgacactgccggtcgtcggcataacgaccagcggctgatgtcgtcgcttgagaagttcgccaagttcgctaacccagacaagattttcatggttggtgaggctctggtcggcacggacagtgtcatgcaggctcgcaacttcaaccaggcatttggcaccggtaggaacttggacggtttcattatcagtaaatgtgacactgtcggcgacatggtgggaacactggtcagcatggtccatgccacgggaattcccattgtgttcctgggcgttggacaacattatggagatctgcgagggctcagtgttccctgggctgttagtctgctgatgaagtagggacgacttgatatcctagtttgttatttctatttcttagctgtatataaatccttactttattacctgcgatcatgttgctatagtctcgtataatgaatcccccaaaaaaaacagaatctctgtacagtcaacttactgatcaaatataaagccacaacctgctaaatttgccatcaaccagccaagtgggcggggcgnnnnnnnnnnnnnnnnnnnnnnnnnnnnnnnnnnnnnnnnnnnnnnnnnnnnnnnnnnnnnnnnnnnnnnnnnnnnnnnnnnnnnnnnnnnnnnnnnnnnnnnnnnnnnnnnnnnnnnnnnnnnnnnnnnnnnnnnnnnnnnnnnnnnnnnnnnnnnnnnnnnnnnnnnnnnnnnnnnnnnnnnnnnnnnnnnnnnnnnnnnnnnnnnnnnnnnnnnnnnnnnnnnnnnnnnnnnnnnnnnnnnnnnnnnnnnnnnnnnnnnnnnnnnnnnnnnnnnnnnnnnnnnnnnnnnnnnnnnnnnnnnnnnnnnnnnnnnnnnnnnnnnnnnnnnnnnnnnnnnnnnnnnnnnnnnnnnnnnnnnnnnnnnnnnnnnnnnnnnnnnnnnnnnnnnnnnnnnnnnnnnnnnnnnnnnnnnnnnnnnnnnnnnnnnnnnnnnnnnnnnnnnnnnnnnnnnnnnnnnnnnnnnnnnnnnnnnnnnnnnnnnnnnnnnnnnnnnnnnnnnnnnnnnnnnnnnnnnnnnnnnnnnnnnnnggccggctggcccaatggcaaggcgcttgactacgaatcaagagattgcaggttcgatccctgcgtcggtcaatactttttgccctcgtggctttctttttgctctattgtcagaggagatgtggttcaactagcggctggttgggtggtatgcagtagggtgtgtggcgatttagtttttgggagtggttgctgagttattaagagcatgaaatgagagatcactatgttcagatatgtttcatatgatcaaggataccgatggtgctggcggaactacatataggaagagtgaaccattgtggatgcagggttgggggatatcaccgaattgccaatatggcacagctatcggtaaatgcaaaccccagggactagaagttgacagctatatatgtcagtggcgatggtggaggtttcaggccgaactacgtatcgttgaatgctaccctatcagtcttgttcaatatgatctagatgagtagctctctgtttgtttatatcgaatcaatcattcttctcttttattcctctcctctgggtgtgctagcacatatcaagtcaagtactttaccatattagaaggaagtgatcattctaacactaccagtggacgcaacgactcgtttgcggatccgagtacgaacaggtcgttagcatgttgatccatccctagccaaaatattattccaactagtataagactctacggcaggacaagctgcttaaggcagagttatatctcgatatagctggtgacgtcttggcgtgtgatcagtacgacagacatcgaaggctataatatcgagtgcgccgacaaaatgtaacttgatcaccaaacagtaatttaaacaagctgtttaggaattgccgccagcagtaaacatacctgcggtaatttagcgaggagtgtgttgcttgataatagtgtgttcgtggtccttctcttaaatataatgcctttgaagaagaagatccgaataatatcagagggctggtagcagacgtcgataattggacagaatttgaaacgtgcccatggccagcggttcctaatagacatcgacgttgtggtctagggaagagaagttgacgctgatctttggaagagtctcgtgacgagaacaatatctttgacagaaagagggtttttcgaaatcgaaataaacgattatcacggtgagtgaaccgggccaagttacagcgaaagaaggatacgtctaggaaattagctgtttatatacatgtgtatcaagtcggggcattgttggattcgccttcacgttcttggattgtcagtggttggcacatgttgtgatcttcttcttaactgactatcttcaagaaatccttacttggccttgggccttcgtccacgattattccttcgcaatgttttgagtatgttaaaatggtgtcacaagtagccatttcagtggctctattaccgtcatttggtgctgtggtgtaatatatagagttaaggtacatgataaagcaaggggcgccatgtttcgagtcgtataatgtgtattttgggtaatatgttgacgatatatgtgtctgcgttactgatttacatacgtatcccttaagagaggctataagagctaatggtaattatatggatgccattggcgctatgcatacaaggggtgtttccagttatatattctggggattatggcgaatcctacaaatcacatcagtatgatgcctacataggtgggcccacctaataaactgtatgatcctgactgctatagcgggtcctgtcttttccccgtaaatatccttgattttactgacttggtcttggatagaaggaaatcaagttatagctgctggaataacttgttgagcctcggcactaacgcattgtaacacaagatcgacacatgcaagggctatgaacatataagccaataaggaatcgacaagcctcatgcacctgggcaggtaaatcaaatgaataattgtcctccgtaccactacccagttaactagttagctccccaggtgctcgctctgctcgctctagggctgcccaggtgcctagatcaaatgactcagcatagatctgcaacatcgcttacatcatcattgtgtttctccagggcttgatccggcctgagatcttttgcagccaacttcaaccatccaaagcttctccgcaatttttgtttctcgacctagccctgcatctacaaatttgtcctcttggctaggcaaatattccatccgcgcaggttgaaacttataccaagaagctctcgcacgacattgcgtctacaaccagactttcagcacgaccccaagcgcatggttagctgtgacaagtcttcattcaatatttattttgctggcgtgtcgccagaatgacgggtccagacctggcttcgctcaatcgccgctcctccacgcagcattaccacaccttcgatactccgccgcccaagtcccgtgggcgacctaactcgggccagtccgagtcctctggggatggctcacacgatacccacaatgagatcgctattcccccaccaaaggcatcaccgctgccgaagaggcaaatggcagtgctagcgataatagcactggcggagcaaacggcgttgaactcgatcagtccatacctcccggacatggcttcgacattccccgaggtggaatcgacccaggtgggcgtatacgtgggcagcattgcatcggcctttgcgctggctcagtttagcacaaactatttctggggctggctttcggaccgtgttggtcgcaagccagtgatcctgcttggcacctttctgactgcgctatgtttccttgcattcggattctgcaagactcttgtacaagctattgttgtgcaggcgttgatgggtgtggtaaatggaaaccagggtttggtgtccacctgtctcggagaaatcaccgaccgtcgcaatcagtcccaggcttttacctacctcccggtgttatacggaattggaggtataacgggaccactcctaggaggactgctcgtttttgagaccaacccttttaatggcaacaaaaatccgtatccctatctcgcgccaaatatagtgtccgctgttatccttctggtggactttgttctcacagctattttcctggaagagagcctcgaagatgcagacagtcttccaaagatcggcaaaaaggtgcgcagcttgttcgcatggctatggcagttcactggcaattcccgtcacccgacctatgtggaggtccctcaagaaccgatacacccccacaaccaccgcgattcagaaaccgagggtcatgacagtgatctagattctgcgtctgagatgtcaagcatccttggccactcagaggaactcagttgggatgagatattcactcgtgatacactcttacttcttttgacatacctgatctttgctctctgcaacgtgtctttcaactcgttgttcccaatattcgcgcaagccaagcctccggccggaaggtcgctcaccccgtccgagatcggccttgctcaaggctttgctggaatcgtgacgattattttccaaatctgtatcttcaaccgtctgcgagacaagatgggcaatcgatggtcttatcgcgcaggcctatttggctttgttgtctcgtttatcttgatgcccttcattgggtataagagcaagtctagcgaagggttgactggcaagtccgccatcatggccaccgagctctgccttgtgttgctggtcaagaccatcgcctccgtgggtggtctgaccagcgctctgcttctggtaagaacttacgatatgcctctttcgataaacccaagctaataattttcctaggtcacaaactcggcacctaaccatgccgtcctcggtgccttgaatggccttgcacagactctctccgcagccggacgtgcagtgggcccattcctctccggcggactattctccctcaccgccaagttgcagcctaaaggagaggctgtggcattcggagttttcggagcggtctcctttatcggcttcatattgagcttcggcatccgtggtcgttcacttgaagcagagggttggggcgaggacagcgatgcaggaaagtcggatgacgaggagccgagcggtgtatgattagaatacacgaacctataaaatgtgccgacatgacgatgtgacgagtttatgctttcgttccagcctgcttttgcatttgaatatacattagcccccgtttcttttatgatagatattgctgttgctgttacattacttgctgaaacaaaaccgggtgttcgattagaccttgagcctgaaggttttattcgagatattgccatgaccccgacgaataatactattcaattactggggtttcgagatacttaaacttccctttatgggtagattaaagccgagtgaagagataaaaggggaatgtctactattgtagtaagctaggctgggtggctgaaacagatatctccttttttgcaaaacattggaatttgttctctgctcatacggacataaacaacaagattttggtaaccagacagcactaaacataattcgaaactggatagagaaatttgagttgaaggagtgttgaaacgaaagagaactcgaaattgaaagataaacaagggtatatggtatatagcacataacgatcgtgacagtaaatcgtggaaaattagcgtgaaggagatgccaaaaaaactaaacagacaaaccaagcagtgaaaaacaaacgaatcaagcccagcgccagcccgactcttgtggcttttgacgcttgataacatccgacagcggggtattgccttgaccaaggggattgcgctgattattttcccgttgacgccgaagcaaccgcacagcagcagaagcatcaatcccttcaccagtgtcggtaatcttaagagcccacttagcatcttgcgtattaaagccaagctcattgaccatcatatcgatggcgcggtcaacagggtccagaacctgcggccgcagaggcagaggcatcatagccggcggaggagtataaaacgcagcaaagccagtagtatgatcggacgaatgagtcagggtacgaggagcagtcccagcagtcgaggtcgaggacctgtcaagaacgagcgcaggcacagacggaataggccggtgatctcggatcgacccgttgagattatggacaatagtgctgaactccgacatggggcgttcagcagagaaggaaaagcggcctgtggtatcgggatcgaaaccatgcttacggcggcgacggagctcgtgggcgaatccggcttgacgctcgcggatctcgcggtcattttcgatagggcttgttctttgcgggctgagttcggtcgggctgtcgagggcgcgttcttggagctcgtaggcgcgcgagactgcttctttcaggaatgaggagcgacttgcttcggtttcggttggttcccacttcgcgagaccgattgacttcgcctttgtgaatgtggccgcggtggtgtcggctgggcagaccgagctgagtgttaagacggcgcctagaccgagagtgagaatgtaggaagtccattcctctatacttgagagttagccgtgcttaatatgagagtttggtttcgcttaccgagaacggtctcctcgcgagccagatcaccatctgggacgttcatgccatcgaaaatgccgaccttgcgagcttcaatgcattttccatgcagcggctgcaacagaacacccatgcacgtccagatctccgtcagatcgtacatctgtttctgcgatagaccggaaagattcccacgaccgaatccctcaggcggttcaaacaaaacattattcatagcgaaaggctgtgtcatcgtcgaagccgaggtgaagtgattcttcgcctggacaccacccttcaaccagtccatttggccagcgatatcattctcccgccccttcccactgccgaaaatccgacagaaggtccagagccgccagaacgcatcgtcgacttcttcagcgcgggtgttatccacacccgccagaccgcgaatggtatcgcgacgcaggaacggcgagcatcgcgcaaggaccaacgccttcagcttggcaagggtgtatatatcctgcgcgtacctctgcagatagagcgtgggcgtgtattccggaacctgggagtcgggatttagaaggagctgccactccatttcccacggcggactcatctcacgcatttcccaagcgggcggggacattttgaacagggcgttttttagcatgggcagctcgcggcctttgaacgcggtgtagatctttttgttcgcgagggcgaagttgaaaaggtcatctagagagtcgatgttctgcataattgacagaatcaaatccaccggcatatcctcagggagggggatattggctgggacattgcgattgacgttgggagggagcgcggatgaaggagacgggggagtcgcggggagttcatagatctgttcggcgagttggacgctgcttgcctgcgcagtcgagaccagggcccaactctgacgaattttggaggctatgggcttctctagtttcacctccatggcgagaggggacaacagcgcttgttcgacttgatcgaagggattcccgggattcgtttgcaaacgaggcaattgaagtagcaggctgtcgcgcgtggggggcagatcgaggggatcaacagaacgcgattccaatgtcatgagagagtcctccgaccgtgagctgacgctaactgcatcgcggggcgtttgcatttgcttgcgaaaggccaggaaggatttcttggattttgcttttttgatttcctttgtgtcgggcttttcgttaatctccttttcctccctgcccgatcgacgggccttgtccttcccctccctcctactaagtttgtggcttttttctttgcttagactcgaacccctcgatatgatcgtattcacccgactgttcttcgccgccttcccttgcggtgtctgtgagtgaggcttcgtggagggggggaggggcgcgggccggctagcaatcaagtccccattatgccggctgatctgcagcggcccgtcaaggatcagcgtcttgcgagatgaatcctggtcattcaggcccgcaagggtatcttcgagttcctcggcggcctgcgacaatgttgggacatgacgagtgcgatgactagtgagatctgaccgttgactatgatgctgcggctgagcctgactgcgtccgcatatatggcatggatggccggattgccggtgggtattcaactggtgtaacatggaatgcttccagtcgtcatggctcaccgtagattgtcgcaacgagaacagcgagtctctcatggagaattgccttgaccactgtgacttgcgtggtgagactaccgaaaggggggagtcgggccgacttgagactgaactgggaccgaagaatggttctagtggcaagggcttgttcctgtggttgttcattgatgcatttttagtgctgaggattgggaagccgagttttgacacgtgcaggtggcagggcgaggaaggccgcgaggaacatatggagtgggtatcgtcgaagaccccggcggcgacgggggaatagatcgagtatgcatcggcggttttatacgggtatcgtccatcatctccccagaatgtgctgccgacactggtcaccgaactgcgatggctatagcacgacgaagcacaatccaaagtctcatcagtcccagaagacgagagggtgatatccagtcgatcggcagatccatatgcatcgcaagcgaagccttcagagcgatataaagtatgcactcgttcttctagttcccgttcgaaaaaagagggccccgtcgagcggtccatattgaaatcagcgctggccggggagacaacggagaagtgtgaggacagctctggaaaaaagcggaccaagcgggaaactgaacgcaatggagggagatggtccgacaatggagaaatttcagaatcgtcttgggaatcccggggtgattccaagtcaatcatagtgcccaaagattccgacggggaggcagactcggtgtccccgaggcactcgcttgtggtatattcttctttgagacccaagtggtgtgatttgcctcgggtatcttcactatcggatgccatatgtgtcgagggggcctctggaactgctccagacgggccatgggtggtatccgcaatctgcactggcattgtctgtaggtctttgttgactgtcggactcgatcgatctgaaacagtggcccggactatgactcgagtttccagaccgaagggttttcttcgaagcttcaatgatagaggacgaaagactatttttttctgattggaggtcttagtcctttgatttgagggatgacgacgccgagaaggtgacattgacaggcaataagtcatatctcagctctttttctgtatcttgattcatggggcattgttggcccgaataggctgctcttgccctttgttagcatgtcacgatgttacttcaagtccccaatcatctgtcaattgcgttagaacataccttaagtccgaattttggtggaagcagactcgtggaggcgttctttgtagaaaatgattcgtctcggctgtggctgcgtagaacaaagaccagaacccaaatgttttttgtctgatcttgcaagtataggagtttgcaaagaggaaatagcaaagaagctcggaatgggaattattctctaataccgcatgacacaggcacagaccggttgatatcgtctcgaaatcagcaagtcctacggagtacaagggtctgtctgtacggagagtatggagtttctcaaaatgacatcccagccgaataagcagaccgtcatgattagtctgtcgattattggcttagtgtgctgcagctacgcagcgataccctggggtcaaaagatcaccccaatccccaattgagtaagtcgttagatgaggagtaaaagtgttgattcaattcttactagaatagctatttctatagccatagttgcatcgagcttcgtgttcatccgtactcacggcgcagtgagtttacgccccaatgataggcggtaaattgtaatacatccacaacatactgagtatatgcatgattgtccggttccccaatgaccgtgaatagctggagctgtttcggatgtacatcgtattatagtggccccagttttccgcatatggagaagaccctcccttgccgcgtggggtccaatttaaaactgacatcctatatgaatatcgcccttacgtagggcttggacttggatgatttgcgcatgcacgaaagtagctcgagtccacatcccctgcaagtgttttccccatcgtcgccttgctttcacagtagaaaaactcgcccaccaaacttgaaagcaattctagactcctggtgccaccgatgatatgtaatatgaacaccgatgaagagcccgaggaggatctagtgggacaagatactcggtagagatcctcgtaatctcgcccgctttgaccttgtttggactatctaggcaagttactcggcgatcttgcccagtgcgttaacctaaggcttctctgcgagatttgtctttcaaacatgataccccagagtggtaggactaagccacgaatgttaatgtttcacgagcggggtgttgctaaatatattcagggctaagcatttcaggaacgagaagtctagaagtgtagaagaagtagatgtgaaatacgagaacatggaatattgccatgacactactaataatagcacaggaggggctgcttttagtgctgacttgtatcttgatgtctcatgtctcttatacgaacatttttcgtctcaagggtctatacagctattcatttatctctaaaggtaatatttcatctgcaggtctctgcaatagtattttttgtccttctttgtcgaacttagaggcagattgctatcaaattccgtacgaatcttctttatgcaatttagtatctggtacacacatggcagtgcttaagcaaataaaactaagaccagagattatgggcagctaggtagacctctcccatatgtaagaagcaaaacagaaaataattcacttcagttttcatctaaaaaccacaaaatcttgcaatttctgggccgtgaaatctctttgttctacggctttaagctacctcttcctcgtcgagtccttgactctttttgatcgccatgagaaatgtgtgattgggttatgcgttattgttgaataatgtctgggctcaatatttcagttcaaatgtatggatatgaacttatcactagaacaagttagttcttcgactatttgttcatttgtgctcttagaaccatcctcgcctaccctttcaggagggattcatgttgctccttacccaataactacgcctgaatctatatttatcttctttgcttcctgtgatcaaagaaaaatgcagaggattgtcacatactaccatccctaaaggttggagagatgaaaaagatataaactagctgtgtgtcaacggcttcacaaacctcataaaatctacaatacaccctgtcagtatcatggtcggttttgacgaagaaatgctggactcttggggtccagcagtttggggagtcatcttcgaccgattgcaaagcggaaatgtcaaaggtggtacgcttcaggttgcctggccaagcaacgtcgacaggaaaacagcagcccagcaaatccaatgggccaccaagttgcctctcgcccacctccctcaaaaggcactcgatataatatttgacaaaatggttggtttctcagtgggggttcgatatatggaagaaaagaagatccacgctatgcatggactcctaaaacacaacggaccactcaaagcgagtgtggaaaaatggttcagatggccggggaccgtcgaaaaatggaggggtttgatccggtcttacaagagttacgaagatgcaatgggacacttgtcggattgcactacgttcccaagagaaaccgataatcatccattcaagacccaccctgcatacaatgccgcaatgcaatgctcttcctgcttggagttcctggttcatttcgggatcgtcacgcccaatggctatgacttatcaggaagaagctggatcgaggcaggattgaatagtcctaatatggatctgctcacctaccttgtcagcaatgcagatcctcagcatctgatcaaacccagagatatcagagaaacccacgaaaaccacatccttctctcactcgtcggtgtcggcgcattttctcaattcgtgattgccctgaacaggctacgccaggcaaaactcgtgcccgtcgacgaactccgcaaaatcttccacgaagcagcgatgcatgagttctgcgctgtcgcccccgtcgccgtggcagaagcactctaccaacacggaatcaacatcggcaacgtcgagcaccagtaccacgaactcggcggacagctagaatcctcctggcacatcgccgcagccttcaacccagccggagctgagttcatggcctggctcgaaaaattctccatgctcaacgccgaggtccgaaactcagaaaacatgaacccgttaatgtacgccgcgtgcttcgacgagccagcctcaatcgattggctctgccagaaatgcgatcccatgcagcccagattaaccggaggcgcgcaggggtacgccttgatctgcgcagctcgaagctcacacctccacagcggcgagatattctctatcatcatctcccacctacccgataagctattcaccaatgaatacggcaaaatcttcggcacagagatcgccgaaggactagcatcacacaagcgcaagctcgccgacggccgagtccgcgaccccacgcagaacgtgatggagctgctcgccgtgcgcaagatgcaagcgctcgtccgccgtctgtctaatcactggactgggagtcaatggcatttggctctggatgcattcatacgcgataatgatctggggatcctcaggcacagtatcggtacaggcacgcgtctgcttcggagcagctcgcgggatggctcgcgcaaccgccgtaatgtacgctatcccaagagccctcagctaagcagtatttcggaacatgaggtgttgccgagggagaatggtaatgggtcggatcctgctctcgcggatgctattaggaggaataggcctagtcgtgttactgctcgcagtggcggcagacagactcttggtcctatcagggattctagcaatatggtcactaagaatgtgggtaggatgggatcgaatcgccgaatttgagatgttgtgtagcggcctggcgctgaagcatcgaaacacgcttctgcgtgtgatgttatttttcatttcgttgctttatgttgagtttttacattgttgttgatgttctgattcgaattcctatcgtactgtcaaaacccagtatagataccgttatttttcacgttacagcatgatcatgtgaccttttgtgcgtttttgattactaagtttgtccgtcatccatggattttcggaccgattgtttttagtttcttctcacattatcgaatcagatcattgtctattgcgtaacctctcttattcaaattaatatgatgatatatccctctagatgtcagtccaatcattagataaacaggttgaccaaaacaaaggatgagattcggacaatctaccagtcaagtgcacttgaagcaccgctctgcgatccaccgctaacacaatctagctctttgcaaactgttgccaattagtaaacagtgaggtaactggaaataaaatactcacgttggtctgccttttggaatagagtgcttccttctggcttgtgcatggctgggaggatccgacccccttcgatccgttcgagctttgtgtgctcctggagtcgacataagatttgacgtgtgtctgattaattgagttagacaatagaaaggaagttcatatccaagatccatacctgtgttatttaactcgcccgaagacctagttaaaataagaattagcgacaggtcttgttggataatagcttgaagtacccacccttgcttagtagagatagattgatattcaacctcaatctctctaatcaaattcttcgtcacactctgtgatacttcggatattttctgaatttcaggtttattgacagcgcagtgggcgaagaggtcgtagcgaatattcgtcttcgactcagaggcgggaaagaaggaaagggcaagacataaacccgcatcctgaaatgaataaataagtgtaatcgggaataaggaacacttttccagactactcttccccgtcatagccctgaaaagcttcatggcgggagatggcctcgatacttcagacattctctgatgtagctcgctggtataggtatcgaggtgacgagatcgagctattaaagtgtcagctattttctctaataattctgacatcagttgcttacttccagccttccaattgaagtctcccgacaaagtcagaccagaaacccaagtagatttccctctaagaccagccaatccactcaaagccgaagccacaccgtcaaatacagccggctcaccagaattgagattcacaaagatcaacccttgatcagtggtatgagtatgaacctcaaatagactattctgcgacttatcaaacccaggaacatcatcaaactgaggagccttcaccagccgaccagtggtatcatagctccagccgtgataacgacaaccaagaacagtcgaggcaccagtttctttcctggtaatagtatacgcacgatggcgacacacattatgaaacgcgcggatcttgtcgtccttaccgcgaatgagaaacaccgggaacccggcgatctcgaaagattgatatgagccaggcttataaaactgggagatatgggcaatatagagccatgtctagaatgcgcattagcgaagctgttcagtgatgttgttttggaatttctattacttggctgaagagcgcacgccgttcgagctcgaagacttcccgaccgctccaccatccttctgggatttcgggttctttggaaacggtcaaatctgagttatctagcggggtgattgcaatagatttggtgactttatcggcttttggttgagataaatggggccatgttcggtggagtagaaagataagtgtcacgacggccacgaggatggaggttagagatgttaggtagtctgtatcggtggaatccatgataaataaaggattgctgttctgaatgttagaaagtggttggcatgccctgatatactgtcactgggaggtttacatgttacccctccacacattacactctccacagttagcgcagatgcctccattacccgattggattggaatttcctggctgtatcactcagatgacttgtcatttgatcccgtatggttgggattattgttatcatacggtgagtactgtgcaaggcattaagatatagttgcattcacattcatatctcatatctcatcaaaatagcgatcattatattcctgcgatactacgctgccatttgaaccatggagggcgcgacatgctcctccagtcctgactctttcgctgccttggcagtcctgtcaaactcatgctgctcgcagaccatatcaaacacccgtctctggtagtctaagggaaatatgtgtgttagcattattgcatgaactaattttaaaagccacaactccaactcacaagacacgccattctccttgtttgggttcagaattccctcgtgataaacccccctagccagattgctctgggccttctcgcagagctcgaagtcttccatagccacttggcgcacgaatttgaagtattcttcgaacttgtctccagattcaagatggaagtagtcaaattccatccgggtgacctgcgggtcagcggtcgggcatactctgaagcaggacatgccaccaccatagacattcagcgtgcagttgggaaagaagtacaggaatagaccgtcatctgacttatttgggtctgcgatatgctgcgagaaattgtgcttgttgcgcacggtgtagaaggtcggcggatagtatttggagaaagacgggtgagtgtattggcagtgtagacactcttgatatccgtcgaccctgacgaaagttaataataacacagtagaaaagggtaaggtagaatattacatggtcttccagttaaaccggccttcatagttgatgctccgacggtgcggtagtttagtgaagtcgactttaccgagcagctcctcgagctctgggaagaattcatggaaactaggagcatcgtcggagatagttgagaagaggagtccagtgggggtgagatgactgcgcagttctttaccctgtagatagcagtgtttagaagggacttcacatttcatctggatcacacgtacggttttcgcgcagacaaccttcagctcctcatccacggggttcagagtctcccctgaagtgcgaacagcggagacagaccgctgcgcaatctcgtatgaaacatgctcgcccacaacctggaatctggtgactgggccgagcaagtaccaggactggagcatatcttagtcttcttcaactgccagaactgagaagactatgttacatactttgagaaagacagcccgccgctccatctgatataacggctggctgcagtaccaggaggcaggcaaagtgcgaacaagctcggacatgataccgataaaattagccagtggattcaaatttcagataaagacgattggagtggattgcgacagtgacagcgaaagagacggatttttatatcgctatagattattttctttcaatagttttatcgatctggattgagagaaatgctttttttgttggcaataaggttgtccaaccttgagtgctggacagatgcggtatatcgtttcccaaacgagttatcgagtcccgtcgatgtcacgcttgatcacatggcacacgcagatctgagatgttctagccgtgtaaggccctaaagatagacataatcttttcagggtcctgggacttttgtgagctgagtcaaaggatctacgacggcatataccatacccaagtaggcatttttagcctgtatgtgctcaagctagattttcaagatgaatgatattgagagaattagtaaactgaaacgttttacaaaaatgcccgatagcaaaagttgctccaagcatttgtggtcctatgtacttgacttcctcctttggtttcctagaccttgcagctttttgctcactgagcacgctctcagctttcaaattaggggtttctcttggctagttaaggggaaatataagacataatgggggattaaggaaataattttgtgttccaaacccctcggttttggatctaggaatctgctatctaataatcaacgcgccccgcacagcccggaaagtaacgatctctggcagactgatatagttcatatagttcggaccctctaaagtatttgattcggcaacattattccacacgctctggtcgtgttcatccacctagataatcttgatcataccagtagtaatcgcctcatgcataaataattcataaatcggcaaagtcagcagaattatgcgcataattagtgtgtttgccttgtttgtacttcatttagaccagctcaggtcattttcgctttatgttgtacgcacaatttctttgcgtatatttaaagaaagagagaaaccacaaagctgcttaatacagatcttttgtttgagatatatatgcaaatacaatattggtgccaacctaatatcccctgcgcggctcggatatgatcctgcccgttgaataccgccattgtagcatatcgctaattttactctgtcctgaagagctaaccaatgagagtacaatttctagacagtttctcctagcagacctaacgaggtactctatttcaaggggatgacgagtaacattgatggattttacgaaaaccatactggcatataaaggaaaagaaatacggcacatgtgcgtatagaatgcatggaaaacatgtttccgcagcctttgttgaatatcgagaaaaccaaaatgctatagtgatatttcacgcagcatggcatgaccaagcgcccctttgattgacgggcgacgtagagaattcctgataggtttttgtcctttggcgccctgtctagcaagcgaatcatacgtagcctgcccgtatggtactgccgtatcatgttgcttatcaggataggctgtagattcagctataatattgagttgatcatagtgtttcatcatacattgcgccaatcgataatcaataccggtagagtatcaagcgaccgctgctgggctggtatgactactatttcaccatttgagctaacatatagtcggtagccaataccagccccattgagaaaccgtaagaaactctccagagcggcttgatctaggtcacatggtaccatgatcgttgtagcggctacaaagccaatcaacagaaggagcaaaaggacgcaaaattggcgcatgttgaaaaaaaggtatgattggaaaatgtaaggtttcttgtatgatatgcttgggattaggtagaagtctcggggaggatttacagaagataatcgccttgctatttactagacctgcatgaaaacattctgtcgaccaggaaggcccactttctatatcgtcgttttgcttccttgttttgtgtactcagtcatttaccaccttgccgtgattatagagcatatagtagtaggatataatgaataactacttggaatgtgctcatgtaaacaggtactacatatagaaatgattgcttcgctgcactcttcactcgacgttgaaatttccgtagtctgaagtcctggctatctgaccctttgccaagaggatccccttctccagatgctgttaaactgaaatggcgattttgcccgaaaacccacgattgtcctcacattattggtcgttcatcgacgctaccgaccttgttagcactagtcggtgtagtggattgggggcatttgatcgctgcctaatatcgtggaatcttgagaaagccttcggaagaaccctatacccgcaagcctatgtgatatactaagtaggtcttggtcgtaaggccatttatattgtaggctgggttttctttgcgttgcaatcgagtcggtattcacctgaacggttcttcttgcaatttgactactggctggagaaaccacatcttacgagtcatgaggagacatcagatcgattggaagatgataaattgctgaccgctcattctggaccaccgtcctgaagtattttgcgggatattctaggtcagcaaaacacagcagccccgatgcactccacgcgagtcagactttcgaatgatctcacgtcattgtctttccgatagctgaaaacccctctctgtttgttgagagcttaacgctatgcggaacataccgaagtagttatataagtgacccctcccccgatactttgatcccaacagatcatatgagagccattttttctgatcatacattttttttgctattcaacatgcgccagtttctcggcggccttttgctccttctgttggttggctttgtggccacttcacatgcagtgcctagtagtgcaggtgtcacaatcatcatgggaccaagagacctaaatcaagccgctatagagagcttcttacgtgcctcgatgggacttgtttgactaccgaatatatgttaccccaggtggtgaatagtagtcataccagcctagcagcggtcgcttgatactaccggtattggttatcaattggcgcaatgtatgatgaaacacaaatgaaacattgggtcgtcatcaatcaaagaggagcttgatcatgccacatgtcacgttgcattactatggtcatctcgaaaaggctgcggaagtcatgatttagatgcatactatacgcgggcgtgttatagtcatccttcttcatatgccggtgtacgctatgaaaactccagcaacaataaatagctgcacatgtttatatgtctttttgtctccatcaagctttagagagcttgatggtagttagatcatcaccggcatttcttattacatctgttgatcattttctctgtcactcagatatctgcgagcaacttggaccacatactacacatataccctatacttttctcacaagaaattagagaaccaataggatgagaagtaactatacgaatggaggccaatgtacataaagaaggcatgatcggccaatcacgatacgtattagccatcacgtgatccattagacagaggaaatatggtgagagctacatagagttaagaagtacactataaccacccaaaaagaccaggaatgaaatacaattggaacggaaactgcaagatatagagagagactgatatttatttattctatttccctctgttgaggttcaaaatgaattcagctgcctagaggatccgagagtggccaccgaaggcgaaagagcaaaatagaagaagagagagattaattcagcttcctcaattccagaaatcaaacatttcaccaaaacgccaacgatccaaagagccagaagaaagagaagagtgaaagaagcatcacctaactaactataagagagatcagacgatccgtatctcttatcgggcaattacgtcgtcaacttccgccgacttgaaaggttggaactcaacaccttcagagccctgaaccttccatgatggccccgatcaaatatactcctcctcctaccccctcacctccagcgtcttgctacgccatgagtgacgacgaagaagatgaatacaacaccatcgcccaggctgcctcgaatagaggggtcaagctgctcttctccaaaagcaaagtatgacaatttccaacaaggaggaataccaatctaacaataatccaggtctatattcatccaacttcctctgccaaagacaatatccctggctttatcgccctcatccagcaaaaacctctccccgcatcacatgcatccgcgactcatttcaaaaaccccgatacaccctcctatctcctcgcatgggtcccagagtcctcccttggagaagcttatgatacatacgtgaaagtagacctctcggaaggtgactcttcgccgcgccagaagtacttggttccgccgcttccgaccaccaccacctacaaagaccccatcggactgtattcttttgcagttccgctatcacagatatactcgcttttagtacgaccaccgagcattggatggtggtttggaagtttagtgatcaacacccgagcgggcgatggcttccccgcgctatttttccatgacgacgaatgcgagtccaccatcttacaaaagaggaagagggtcaaggaaaccttcgatccatttggcaaggaagggggtttgttttggggcggcgatgaggtactgcgctggttacggaagtatgcggaggtgcagcgctcctcggtagacaggaacgtctacctcgttaacccgtcggatgaggaccagctgtctttcggccagctggtgacccatggcgacaaatccatcccagggcagacacagcccgaagccggggcttccgccggatcccgagccgaacagcctgatgccagcatggatccattcatgaagaccctcaaggagacacggtggaaagtgctggagcagctcagcaaaatcacgacctttacccgtcggactgccaatgatatagtcgataaccctctcataccgcctcagatgcgccgtcttttgaaaaacccagagatccagacgttgcaagatgagttcgacagcgccagggtctatctggctcgttgggcgatgagtgttgccgagcagagcgacaaagaccgaaaccagcgtatatggaccgcgcaggatatgctggaaatggagaatagctcggttggcgactttgagatcttagagctggagaccgggaacctggctatccaggagcgacgccgtgttctccaactggaagaatgggagggcttcttcgacccgagctcgggtagactccaagtcacagtggaggaaattaaagagcggatcttccatggcggcttggatcccaatgatggcgtcagaaaggaggcatggctcttccttctcggtgtttattcgtgggatagcagccacgaggagcgtcaagcaatgatgaactccaagcgcgatgagtacatccggctgaaagcaggctggtgggagcgaatggtcgagggcaactcaacggccgagcagtttgatcattggaaagagcaaaagactcggataggtgagattatacactgaattcgacatggtggctactaacacatggctatagaaaaggatgttcaccgcaccgaccgtaccattcctttatttgcaggcgaagatattcctcatccggatcctgattctccgttcgccgaaacaggtaccaacgtgcacctggagcagatgaaggatatgctcttgacctataacgaatttaacccagaccttgggtacgttcaagggatgagtgatctcctagcgccgatatatgctgtgatgcaagatgacgccgtagctttctgggcgtttgtcgggttcatggatcgaatggtatgtttccacgctgcaaatcgccgcattctcttactaacatctctgcaggagcataacttcctccgagaccaatctggaatgcgtggccagctattagctctcgatcacctcgtccagctcatggacccgcagctctacttacatctgcagtctgccgatagtaccaacttcttctttttcttccgtatgctcctggtgtggtacaaacgggagtttgactggagcgatgtcctgcgtctatgggagacattgtggaccgactatctctccagcagtttccacctgttcattgcgctcgccatactcgagaagcaccgagatgtaatcatggaccatctcaagcactttgatgaggtgctgaagtacagtacgttggcattggcatctgaatgtaaattgatttcaaattactaatttcgtatctccagtcaacgaactctccaacacaatggatctcgtacccattctcacccgcgcagagtcgctcttccaccgtttcgagcgttccgtgcaagccatcgacaagagaggcaacttccccactgcgcccaccgctcaccaacgtcgtccagggacaagcgaccaagattcatcttcgagcaacaagggaaagtcaccccagctcgctgtcgggtcaagcagcggagtcaacaccggcccctctactcttcaaaaggcaatcgattcccagaagccgaaggtggtttctccagagctacgcgaattacttcgcaaggacattccctggaaacgtcaacaaacttcatgattggcatcgtgttgaagttgggattggatgtctcgcttgatatgatgttacactcttgaccaagtcatgctttcagttctcgaagtcttggctattgacgatttacgattgcctcatgtatatttttcttcgattttctttactgtcggttttgcggagcaggatatggctcacggacttttatcttgaaatgagcaccccgcatttgaattctccaattacgctgatagagatatctacaataggcagactccacgtagaactacatctagtaaggtaatagactcgtctaataaggaccgcggcataccaaagaatacattgttgtcaatatagaagtgtttaaagctggtcaaacggtgctggattgcgcgagggagatagcttcacgagatattatcgtcagtactgcaaataaagtggcatatagggtagatggtagactcacacgaaaagacaaggctgctcatatagacgtcaacagccgccagcaatgattctggcgcgcatatgcctatattcatcgttcatgtaacgacgtacctcccgatgccgctcgagaacatctatagctcagtgctgatcactcagtttataagccagcgcgatatcgagggagcgattcacgtacgcagtattacgagcgtcgtcagcatctagccccaaccacaggatctgtcggggactgatgactgagaaggaaatgataagatgagagaaaagaaaagaagaaatgcaggaggagaaggactatgaaaggcagaaaatcaacgataaataagaaaaagaaagtttacttggcccgaagtgaccagcgacgaccagggtctaattccttacaacccatctgcggtaagaccaaacctccagtgaagttcgctcctgtcctagggccgtcgcgtcgtagccagccggatgtattgcatccgcctgtgaagatataccagtctttccatactgggagtgttgggagaccgttctgcgagatcgtaattgttggtctgtgtggtactcttgtcttacggatctctcctttaaagtcgaagtcccaagcgaggttttcggtgcggtaactatgtcgtgattcgtgaatgcaaagcgaggcaatggctgcgtcgccggtcaggcgtacgtgacgtggtcgccacacgatctcgatctcgccagtggttgggtcgattacgtcttcttcgtgctctggcagtgtcgtcgccgcttcgctggcttttctgggtttcgcagtcgttccatcgccggcccagtcaagggggatcgggtacattcgtagacgtggtaacacagtagataaagagaaatcgacatgtcacatgattgcgtctcagagcaggatgaagattcatgtggcagaataaattgctggttgatgtaagactgggatttggatcgcagttggcacctcttcagaatagtgattcgagtaagcggcgacttctactgcgagccctttcttgctctcgcacattgtcaattcactccagtctgtctcggtatggattggcgcgatcagcactcgagctatgttcagggaagtatctcggtgattgatagatggactcttgatgaggagcacgggggggggggggggggggtgnnnnnnnnnnnnnnnnnnnnnnnnnnnnnnnnnnnnnnnnnnnnnnnnnnnnnnnnnnnnnnnnnnnnnnnnnnnnnnnnnnnnnnnnnnnnnnnnnnnnnnnnnnnnnnnnnnnnnnnnnnnnnnnnnnnnnnnnnnnnnnnnnnnnnnnnnnnnnnnnnnnnnnnnnnnnnnnnnnnnnnnnnnnnnnnnnnnnnnnnnnnnnnntaggagtgagtgcggggggggggggggggggggggggggggggggggggaggatgtagagtgtaagaatgagggaattcgagaatgatacttattttacaattagcagtatgaagatcatctgactggggattacgtcttttggattctaattcattcttctgtcaatcatcagcagttattagtcaggcctttctttgcactctttgcctcatatcagagatgttggaggctcatgagagtagtttacttaattaattatacattgaattctttattttcccaaaggcactccgtcttagtgaacaagacgtgaatggcaacctagagatatctatcaggcttccaaatgaggaaaccctattagtgttgacagaaattgttggtttagcgcgattatcaaagagctcgatgtctaagttttgctgtccatttcgatatagaataattttcttatatcaaatgtctatcattgacctacttagcctaagccagaatccacgtgacatgctctaacacatgttatacaaagagttggacccatttgctttatattaaggcctttccttctctctcttcttcttcctcttctcccctcactctctcccccctacatcccccaccccctatatttataaataatctctgactgctatatttgacactcaatttgctgcgacatgtagaacagggtttcaccaacctcctgcctatactgagtcccctttataccggccatcgtccttaccgtgcgaactcatattagatgttaccatattggccttatagctaacttaatacagcagacttcggatttcctaacgctccactgcactcgcgagcctcgcaagcatgcagaagtcgtctaagaatttgatatttttatatccattgtttttggattgattttcggtctaagaagaaaccgaagaatgaaaacagccattcaaggtcaactgcattcgaaatgccgccgcctcggctctgccagcgctttttcagggagcgagtcaaataagaactggtgagctttccttaggtcttcgcttttattctaccccttatgcatctacatcgttgcatatcctttcatttgtcttcaactccgctaaccaccgctgcaattacagtcttcagcctctcgagctagagaattgtgactcatagaatgatttccgtcgagcagcgaggtgaagaacccgaaaacgccatccaacaaagtgtcagtgaaccggggtgttacaaaatgaggtcccaaatggatacatcattgctcggttcgagaagtctgccacgcggcttggcaaacgaggattgaagacggtgtcagattgtgagccttcgagtcgatgcgattatgcacagaaagaaagctcggtttaccattgcgaaaagtaaactaccctcgctttccctgcaaccaaaaacaaaggccaccatcagcatggccgcccaaagccaatagccgccgccggcaagcacctgactccagacaaagtgaatgatgaatgccggacaggaacccgttcaggaggtggtactgaccttacccggtgaggaggacgaagccgaaaatgagccatggaggagttgattagcggaaaccgaaaggaatggagttgttctttgagaggggttggagggggtcagatctctcaaatacgcctgagcatatatatcggcattcgctttcacggattgagagagagaggaaattcaacaagactccaggaacaggcaatgactgtcaatggattgaaaacaccactcgcaaagatcacgtcctgacgctggactgcttgctataaagtgcatcgaatttatctttacatacagcgaactgattaggtgttgggtgggcggnnnnnnnnnnnnnnnnnnnnnnnnnnnnnnnnnnnnnnnnnnnnnnnnnnnnnnnnnnnnnnnnnnnnnnnnnnnnnnnnnnnnnnnnnnnnnnnnnnnnnnnnnnnnnnnnnnnnnnnnnnnnnnnnnnnnnnnnnnnnnnnnnnnnnnnnnnnnnnnnnnnnnnnnnnnnnnnnnnnnnnnnnnnnnnnnnnnnnnnnnnnnnnnnnnnnnnnnnnnnnnnnnnnnnnnnnnnnnnnnnnnnnnnnnnnnnnnnnnnnnnnnnnnnnnnnnnnnnnnnnnnnnnnnnnnnnnnnnnnnnnnnnnnnnnnnnnnnnnnnnnnnnnnnnnnnnnnnnnnnnnnnnnnnnnnnnnnnnnnnnnnnnnnnnnnnnnnnnnnnnnnnnnnnnnnnnnnnnnnnnnnnnnnnnnnnnnnnnnnnnnnnnnnnnnnnnnnnnnnnnnnnnnnnnnnnnnnnnnnnnnnnnnnnnnnnnnnnnnnnnnnnnnnnnnnnnnnnnnnnnnnnnnnnnnnnnnnnnnnnnnnnnnnnnnnnnnnnnnnnnnnnnnnnnnnnnnnnnnnnnnnnnnnnnnnnnnnnnnnnnnnnnnnnnnnnnnnnnnnnnnnnnnnnnnnnnnnnnnnnnnnnnnnnnnnnnnnnnnnnnnnnnnnnnnnnnnnnnnnnnnnnnnnnnnnnnnnnnnnnnnnnnnnnnnnnnnnnnnnnnnnnnnnnnnnnnnnnnnnnnnnnnnnnnnnnnnnnnnnnnnnnnnnnnnnnnnnnnnnnnnnnnnnnnnnnnnnnnnnnnnnnnnnnnnnnnnnnnnnnnnnnnnnnnnnnnnnnnnnnnnnnnnnnnnnnnnnnnnnnnnnnnnnnnnnnnnnnnnnnnnnnnnnnnnnnnnnnnnnnnnnnnnnnnnnnnnnnnnnnnnnnnnnnnnnnnnnnnnnnnnnnnnnnnnnnnnnnnnnnnnnnnnnnnnnnnnnnnnnnnnnnnnnnnnnnnnnnnnnnnnnnnnnnnnnnnnnnnnnnnnnnnnnnnnnnnnnnnnnnnnnnnnnnnnnnnnnnnnnnnnnnnnnnnnnnnnnnnnnnnnnnnnnnnnnnnnnnnnnnnnnnnnnnnnnnnnnnnnnngcgggagggcggtgggcagcggaggggggggggggggggggggggggggggggggggagttcatgggaggaatgtttactagatgttaacaccccgagcgcgctaagcgtctcggctctctgtctcctcgacagcttcttctgggcatttggggggatctaggcacgcagaaacagcctgcgccctaggcaagtgtgcaacaagaagcatatggatcgtactgttatcttaatccaacaatcaatacttctggcgcttcgagcgctcattcgcagtccttgtactttttggtgtcttcgtcgtgggcacctttttcgctttggtatctcttgtcgttgtctcagaactatagctcatggaagtcgagatatcgcgcattgatcttggaagatctttaattactgaaatacgtagcgtagcgtcttgaatatgaagaaaatgtgatatgtatccaactattaaatgctaagataactctatcaaccagataactgtagggtattgttgaaccacaccaaatcccaaaccaaacacaaaaccaagtgagaaacagattcgccacgctgatgcaagtagaagagaagatataacccgagataacggacggcgtcaaaatgtactgccaaatgtccatatgtccaagagcgcagggccaggacgtgaagaaaaataactgtagacccatccatgacgggtgaagcgggggaataagaagagagaaaaaatatgggaatcaaaagaagagaatttatatgcgaaggatcattctgtcgaagttcacggcctgcgagaccccagacccttcagcacgacccgcctgcttgtgcccattgagccgatatcgccaatgctgcggactttgggtaaggagtgttcaatcacgctgccatcgccaatttcaaatcggtcatcagcatcgtggtcaggcggcatgctcagtgcaaaatggggtgggttctgggagctggagcggcgggtcttttggagaacatctgcaacccaggcttcaccctctgggctcatggattcgtaccgagcacgcggtctgggtccagctaatcccagcggggtggagcgggattcgttggccgtggagacagtagcggttgcgctaggagaatgggcgtccccgactgaatagccagaagacatcgacagacgtctaccggccgaggaagggagaggggagacagcgggctgaggcgaggtaaaggaggagatgtggcctgtcgacactgccctagtgttcatcacatcggatgcggttgagcctcgtcgtttcttgtgaactgtaagggatgaaggtggccgagcgctgagcacggaggatggtcgagagggggtagcccggccagaagcaagatatgaggtagccggggttagcttagtacccggagaagcgtggggtggtgaggaacgtgtctttataccctgcacctccacacgaggcgtttcagacaccttacgacgaccgtgatgaatgacatattcacgaaggtattcgcccaggtcggcccatccaccgccaacacgaaccatcactcgctgcccctcttcgccaacggtgcgaacgaacagttttgtcggtgcggactggcccccatggtggaggtggtagagtttgacacagctgtcctccgtcttgtaggcatgagagtgccgtcttcgggcagcgggcattaatgtcagagaaggtgcgggcgtcgtgctgcgagttggaccagtgggagattcggatctgtaccgcattcgtcggtccacggatgagaccgatgaggatgcgtctacttcgtggttggaatcgaccaaatggattttacccggcagcgagttgagaatcgagttgatcttttcgtcgagctggtctcgcggttgtttgctgtgcttggttggcgaggaagggcggaatccgaaatcggtgagttcggattcatgctcttctacatatgacagctcttgtctcttcacacccagactttcgagactcggatgggtagtcagtcgttgacgccatcggagagacttgggctgaagaagatgttccatggcccttcgagcggaattcatcccgaacgtctttctgtttcgttccgcaatttttgccatttcattttgagtgttcaagtcacttgcagacttccctcgtgacaatttatgctgagtcgggagacgtggaactggtggaatggacgaagcagaagtatcttggaatgtgattctggttcgtgtctaagatagtcaattagaatgagcatattatcaaatggacaatgggccacatacctttggggattttgcgaagtcggccgatgtaacagagtgtgttctagtcctagacgatttcacactagccacacctggcgccgactcgcttcccatgcccaactccaagcgttcattgatgaaccgctcgaggggtagactgaccgtgcgattttgttggaaggagattcgcgggtcaagcttctggttttccaaacgacgcagacgatcctctctcaaggtatgatccccatgcgaaggaggatgcgtagattcagggcgagacgatggcccaaggggtgtcacattagaggaagtaatgtgctgcccatgtgtctcgggactggatatgagagaagaatggtctgaaagcaaagaacccacagatccagtagatgaccgacgacgacgcgtgattttatgcgccactttactatctttgtcgagatcatgcttcccttggcgggatttggaaagtctaatggggctctgcaatggcttgggaacattccgttgacaagattctgctttcccttcattccgcgggtggtgagactcgatcgagcctgacttgggtgatgccaccgccatgggtatttgggaaaccctgctaggcggtctcgatttcggcactcggattactgacctgtttggtgtgagaaccggggagatagttgctgctaccggagtatcacactggttctgttcacggggccggtttggagatttagggtcctggccagcaggagaaccgatggttttaggcttaggattgagttccgctgctttgtgttgtggagaaagttgtttttcctcctcgtcggaggtctgttcttcttcaccagccacagtatcacgaggcaagtctttgcgaccagcgggggcattcgcctcttccgcggcggcaaccccaacagagaagacgaccttggaaatttggacttccatttcaggtacagtggaatgttgaacgaatgaatcgtcagtatgctcggacaatggacttggtcttgtcgatacctgactgggaggtgacatagctccatcgagctgttggaagccgggcggaggaatgttttccttgttttccaagctgcgatcaattgcacaaggcgtagatgcaggagttaagaagggctgtcgattgatcgcaggagttggtggaaagtcggactgtgttggtgtttctaaatcctcatgcttctcttccattggagacttggatagagatattgagagtttgagctttggcgacacattcccttcgactgcaggaagtggcgtctcgttaagaggcaccgtgttgttttcaacagattgcgagctagttggttttgcgtcactggatgagtgtccaataccacactggatttcaggctcatgcttgacggcctgctcctgggggaaacgacgatcatcggaaggttccgatacaactgtatcggaagtttggtcctgttgtgtttccttcaacgactctgtgcgttgtaggtcggctgcgcgcctctcagccatttcagactcggcttttgaccggagccacgcattgtgaaccttgtaattatcggcctcgacaacccacgcagcaaaatcagactcaatggcttccaaatcatcaatccattgttcgggcaaagaatccggacgaccttccaacgcgtcgagaactcggtccatccgcctccccacagccacaactgcggactcaagtttaacatggtcaacagctagagaagcatcggataattcggtagggtcggggaaaaaagaatgtggggctctgatggcgtggagggaggagtcaagggcggagcgggtcaagctgagctccctcagcagcccaggaatttggcgtaagacaaaaatgcgaatgtcccaagtggctagtaaagcgttcagtcgcgacaggtatggaagagcgcgcaaaatggttgctgtgatgacagctgtaaagtcactcagttgtacatagctgagcggcggaggcacggacacacagcttgtggcggacgagggccgagacctggagggaatgtgggcattcaaaacgtgttcctttaattcttccacgttaagatcttccattccatcgcggatttcgtccgccctcctctcgtatcgctcgacgacgctggctgacaagcttccgtagtagctttcctgggtgttgctagggggagccaaaaagccccaagggatagaattttccccagagcacgactcagacggaggaataaaacccatcccgacctttgcgtcgcgttgatttggccaatcccatgattggacctctttatgccacaagttcaggttttgggcagctaccgccgcgcgtatccctagggcgcgttccgaaggcgacacctgggagatacttcgtgaaagaatatcatgagcaccttgttcattcgaagggactgcgtcgatggatgtgagggcttggagagttgattcgggagaaaggttactgaggagagggtcgagttgctgatagacggagccggggattctctccagtgaggaggttgagcgcgagttgtttcgggagtgggagggagagaggcgaatgaaagggcggttcggatttattcgagtggccgccatgccgaatagatgctcagcctaaatctgagatgtaaagtcacagggagcctcgactggctcgaggatggcatgtaagtgacggacgtcggaacgagggcgggaaagaagactgtcgagcccgcatgctgagacgcgcgtcttaagaaagtgcagaacttggctagcagctcgaaattggaaaggaaataaagaaatgaggaaaaatgataaaaacgattggaagttgagggggaggtcgaggtacaaaggtgagaggatgcgagaagcgagggacagcggagagtggaggggtgctgaagtgggcacaaatgagcgacaagaagagaaagaccggctttctgatcacaatgatatccaaacaataatcggaagattttctgaagttgaatttattattgaagtggagattagatcaggggaagggccctaaggtcctagtggagttgccgacacgaaccatcgccgggtgatccgccctttactatggggatatactacagttcttcagttcattttcttatttacgatataacttggactattgaagcatatcggcggatcggaggcttgtggaatcggtgaggaaagcagcgatataaagaaatattactggaaggggaaaacaaggctatttgaaaatagcttcaactatagacgcaaggagtaagaatattaatatttacccaattatttcctatgacctccatagcaaggccttgatatagcaaaatcaaaacaaattacctattcgatcgatctctatcactatgcggtaatgatggcgttgtcggaactgatggcgcacctcctagcctagggccgaggaatatccccgagaactcttcagagttgcagagttgcagcaaaagtatcttctaacaagccagtctatcatcatgcaagggtttcgctaccgcccagaacttgtgaaagatcttccggaagagttcactaaagagctcaaggaatatgaagattggttcatgctcgatgcgcccaagttgaagatgatcacagatcattttgcccaggagctggagaaaggtctgagcgttgagggtgggtctattgtcagtatcagttggccttgaatatcaagtagatgctaactgaaacgttgacctgaagcctatgaatatcacgtggatcatgagatacccaacgggtcaggagaagggacgcattctcaccgttgatctgggaggaaccaatattcgtatatgcgatgtctgtttttccacggggaagagagacttcgagcaacgtcagcggaaatacaagcttccggatgaagtcaaaaaaaccacgaaagaagccttatggggtttcattgcggagcgaatccaactttttctcgacgaaagtcgctgtgaaattgagagtgctagcagtgctagcagtgctagtagtgctagtagtgctagtagtgctcccagtgctcacagtgctgcccgtgctgccagtgcttcaagcccactaccgatggcgttcacattctcatttccagtggagcaaaagtctatccgcagtggtattttgcagcgctggaccaaagacttcgatattcccggagtggtagggcacgatgtagtaccgcagctggaagaagaacttgcaaagagggtaagctcacgttggataccaagaaagtcggagctgatcaaagtagaatgtcccagtgaaagtggtcgccctcgtcaacgacacagtggggacccttatcgcgtcatcttaccgggatccgcagataaaaatgggcagcatttttagtactggctgcaatgcagcgtacatggaagaatgccgtttgatccccaagcttcatgattcaggactacccgaagatgcaactgtaatcatcaacaccgagtacggctcctttgataacgagcgcaaggtgctacccttaactccatttgaccgacagatcgacgatgagtctgcccatccaggcaggcagatctatgagaagatggtggctgggttgtacatcggagagatgctgcgcctggtaatgctgaaaatgcacgacaaaggtatactcttcaagggccaaaatgtctcacgtcttcagactgcgaactcattggagacatcgtttctgtctactgtcgagaaggacatgtcggaaagtctgaccgatatgaaagaggagttcagaaagtgcctcaatctagaactctcattggatgagctgaaagcgtgccgttggcttgtcggcctggtcgcgatgcgttcagcgcgtctatacgcgtgcgggattgcggccatatgcaagaagaaaggaatccgtcagtgccacgttggcgttgatggtgcggtgttcaataaatatagtatgttggagggacgggcaagccagggtcttcgtgatattttcgactgggagccagacagattggacctgatttctctgaacccggccgaggatgggtctggaataggagcagcgctggttgcgagtttggctgttgacccgggtgaactagaagagtgtggcacagaggaatatttgtaaaagtgaatgccatcaagctgttccaaagtgagagagaagagttgtagtgaaatcataggacgatagcgataagcacgtaagtgaggtgtcgaacctccctccattccccaactcgcaaaatgcgattccgaacacaaataagagacagcaggaccttctccagtaagaccaattgttgaaatagaagatcagagctaactcaatcagagctcaccgcgtcgctgtcctcgctaggcaaggtatgttggatgcgcctggagcacgaagtcatccgcttcaccatcatacctgaccaaggcacacaagtgtgggcgtcaataccggtcgtatgcataatgatatcaatttatcagtcatatgatctatatattgaccatctcccaggaaaccattttcgatgactcgacctacgagctacagtccaattccgacgccatcaacatcgaagtcaacatcagcgtcctaaatcgagccctgcgctccgcctggggctcaacacatacacagctccgcctaactaaaaaggacaaaattcccctcttggcactaacagtcctcgcatcagaatggacagagggaaacatggccttggccaccaataatgacacagatggctttggcgacgacccaaatccagacgcagctccagccgatacgacgggcgatcggggaccacgcgagcgccagacatggattacgcaagaaatcccgatcaagatcctcaacgaggcagcagtcgaaggcctgcacgagccgcactgtccagaccccgaagtgcacattatcctacccaatctagcgcagttgaagagtatctccgatcgcttcacgaaactcgcatctacagatagcaaaggtcgaaagccgggtgtgatggcgcccgatgcaccggggatgcactctgtttctttcggcgggccgggcgctagcacagctgcgacggcactgtccaccaactcatctcccaagcttgaattatctgctaatatgcatggctcgctacggttggctattgctacggacgagctgcgcatcgtgagtgtctggtctgatctcgtgaacccgccgttggaccctgcgcagatgagccaggagcagatcagccagcttcccagtgagcttaatcggaggcgggaggcgagtgagggatctgagtctggttgggctaaggtgcggattgatggaaaggattggagtcgggtgcttagtattgggaggcttagtcccaaggttgtcgcctgtgggttttctgataggttgccactcgctggtgcaagtgctgactcgatttctcgtttgttatgtttaggcttcgtcaatgagatggcactagttttatacgtttatctgccaggtaatggacagggggaagaatcttgtttaacggtgagttgacattactccaaggatgcattacccaacaaccaagcgttctaacagtcgtcagtattatattaattccttcaccacatgatactgtccgtggtgaaacttgggctacaatgtcatcttcgcaaggttcaggcgttcgaaagtcggaatgaattattagaaatcgttattaagacacatgcatgtcagaaaccatgcaataagaaacccccaggtcccaaaagttccagcaagcaacaaaatgtcaggccagaatagaacagcaaggggaggaggatgatatacataatgccaggagtacgagcccttgactccatggatgaggtggcaccagggaacagcaacgagcaagctatgtgcaaaagcaaggcttccgataacgttcagtgagcgagaatgcagagagatgtcgtgtctgccgaggcaaaaaaacaggacacatgcaggttgatggggcaatgacaaatctagtaacaggggaaggttatattattcaagggtaggggatgttgttcatcaaagtaatcatgtgataacaaataaaaggcataacaatgaaacgaacataatgagacaaaagaaaaggacattatagcactcagctagtcgagagactagtaaagtactatatcatcagcctttctctctgaatggctgatgattatttagccatcacgtcaacgtagcgtcccttcttcttgccgcgaactgcgctgcccttgcgcgcctgaggcgcaccgatcaaatcgtcaattgagctagcatgagtcaaggacgaagaaggccgtggcggcgggccactggaactaccgggcggtgttggcatggccgctcccgtagaaacggaccgaggcgcgagaccagggaagcctgggctgggggacaagaaaggcggtgcggcggtagaggaagattgaggccggccaccagagaccgacattgggggcatcgggggcatcgggggcgcaccgttttggggcatactatttgagctcgcagtccgactggggggagcggatcttcgaggagggggcggggtggcatgcacaggcgcgctactaccggggtctttcttgttgacccatttcttcagttccttgtcgtagtaaaaggagctctcttcgccaagtttagctctgataggaccgccaccggagttttcttctttcttagctccgccgaaccaaccaccaaaccagcccttcttgccagattgttggggaccctttttagctgcaacacaagtcagattagcaagtgagataagcaataggcgtttctaatacataccatcttcctcggcggcttttgcgaacgcttcgttggccttgcgatcattctccgctttttggatagccgctgcccgggcagcaagatcgtcgtcgtcgtcatccatgatcgactgcttccttggctgctccgcggcccgtggcaggtcctcctcctgggaaccatagcccatgtctacaccagccgcagctggctcgtaagaatttggctcataagagaccggctcataagatgagctggcagcgggaggtgcgtagggtgactctgagtctggtacactggctggcataccaggagggccttgataatatggggattggctggatgtggcagcctggccaggaggatggtaaaagagaccattcaccatagactgtgcagccggatgagcttcagccggtgacgtagcttcttctaccggagcaagaggaatataagaggattgaggtggtgttggttgatacccacccgcgcttggcgacccataccctggagctccataggacatctgttgatcaatcgagggcgagagttcctgtgagcttcggcgttgtccatagggtgggaagtaggaagcagatctctgagaatctattgacgatcggcccttgaactgctcaggtgaggcaccaggcgcatattggctcgatgggtgatacttggacgcgccgctggtaggaataagcggcgctccagccgcggctccaggataagagccgtatatttcagatacagaaggtgagcggctaattgttggggtgccggccacgtttgcaaaaggaccaaactccgcatgctcgccacccttgccggatccagtcgatgcagcatcgctatcatcgcctaccacgaagctattgaaacgagcccacatagaccccgagaccttttccatgcttggtctcgagatccaagagccactgtcgctggttgtttggcgcagacgagcagacaactcttcaacttccgcaaagaggtgttggtgatagtagggcgagggacgagtggttgctttcaatgccgctgccactgcgtcgcaatagccttgcgcctctaaattgcgaccctggtctacgaggcacctggcattcagtatcttaaatgccaacagatgtggcagatgagctgtgggagagttgccgagaacagacatagcaaactcataggcctcggtcagcaagatagcatcttcatccatcaaggaagaagggcaacgctgatggtcagcaccaaggagagtgatgttggcctgtggatcatccgggccaccgaaaacggcagcgcgcgagaagatgtaacaaacgtgagctgcctccgtccgtccataagaactaagcagatgtccaagagaaaaaagggcttggtggtccccaggacttcggttactcaaaaccagtcccaaggtatccctccatttgtctaaaccctcgagggcatttttggtagacccctggccattggccatgctaataagttgcagacctgcccgggcagacggggcaacgagttcgtcgatgctttcttcgatattgccagcgaaaatctcgtagagggctgcaagtgactcggtgtttgcggatttcgatcggacctcgcggcggacaaactcctgcgcgacctgtttcgatattgacctgtccatggtggatgagatgatcatcgcatgtccccaaagacgtcgatcgacagcgctccacacggccttctctcgatcgccacatattaagtgtagtcgaagctcttccaaccactgtgcatcaacagcatcagcctgcaaaggcgtttccgaaggggcaacccctcccgagggggctaagctgcttgcgtatgatccgtctgcgtcggagttgggtaggttggggaagatgatatgtcggagagaggtttgaatttcaggggaactctccagattaccgtcattctctaccagaagcttcacaactttccagagaagggttttctcctcctggcgtttgtgcgtatcagactgaacctgttcgtagcttggaaggtctgaattttcgaatgctgcaatcttgctagaaagccaagcaaccaaatccttcttctttgactttgccttgagaggcccagggtgctggacaatggtatcagcggagggcagccactcgctcagctgggagattttcggttcaccaagagtgggttgaatcattggcgccacttgtccaatggaatagcgagggacgtgcttgggaaaacaagataccatggatccaccgaacccgaatttgaagatcggagcacctttccatcgttccaagggatcatgctcctgcccatcattgggagcgataaattccagatgatgcgtcggagcacgggtttgatgaacaggcttcacaggagcatacggattcacggtttgaattggcaagcttgaaacttgcaccgaagccggccgttggaggggatcgatgtcttgtccgtaggatcgcgggctcgtcaagtcccgggcaggtgactgagtctgagatctgcgaagtggacccatttggaaatcgctaggtggtggagacaatccattggccgggggagcaggaggagcaggaggagcgtgttctggacccggcgcaagacgctgagcgaattcattgagatattcctgaggggcatagcgactttgaggcggagatggctggagaggtgagcccgcactttctctccgcggtaggttggcaggaccgttgaaatattgcggagcactaggtgggatttgtccgaaaccagctccttgctcgcgcggcgaagaaaggttgatcgcaggctcaagcgatgggggcctgtgtgattgatcaggctggtaagaaaccttttcatggtgtgcaagaggacttgaagtccgtggctggaaaggcaaattttggccaggaacgttaagcggctgtgaggcataacgattgcgaacagaagaggtaggagggggcgcaggcgaatatctcggcaacgaaggtggctttgggggtgcttgaaaaccaggaggttgaggagagtaccttgcaacggtaggaggtccgaccggggcactcgatgacaggctagcatatggatccagctgttcaggtggctgaagtgtggattggattgggagcccgataggttgtggggctggtggtacaacagaagcatattgaacctggggaggaggaagagacgatccggtcatcgtcggcgccgtctgcggattaggggtgtaccgacctgagctggcaggcctagatcttggtggcggcagagggagttcctcatagaaattcttcggcgcaggaggagcggccagggctgaggggggagctgccggaggggggaagccagctacagcaggaatcggtatgccagaggcacatggaagaggaggcggtggcatactaattactggtggaggaacaggtttgtgggtaacgaccggctttcggggtcgggagatatcatctggaaggtcgtaaggagatttataaccctcttttgaccgctcagcaaagctctctcccctgattgccacggggttctgcggctgttgcgagaagtatgatgacatcgctcccgtggttggcggcgcagttcctgggagaggaatattctgcaaaagatcaccagtggacggttggtggggtgtgtatatattaggaacaggtcttggctgagaaaagacttgtggggtctggaacggactgttcaagccaaccaccaaaccgtcgttgacaggctgaacaggggtttgatgagcgtgctcctgttcagagacagactgggcagcttcagtctccagcagtatgtcgtcatcgtccaatgccgcctcccaacgagccgccagatcatcgtccagtgagtcaccgagttcagcttcccaccgtgccgctagctcctcctccgatggatcggccattgtttggggctccaacgacgcagccttcagggcatcatcaaactgcgctgcggccgaagtgtcactaaccggggaatcgagagcaaacccggctgattccaagacctgagatgtgctctttcgtgcgatatgaacaacgggttgctcctcgggctctttctttggggtggaggcgaagaaatcctcatcggcgttcttagcctctgtctttggagccgagatgaagaagtcatctacatcgtcttcatcgttggcaaacacactgtctattgatgtctcctgttccgttgggtgttgaggcgaagccggtgtagactcatctaacaacggaaccccttcctcaaacctggattcagcttctggcggggcaaagataggctttgtctggctgttcagttggtcaaaaaagccgtcctcatcggactccacttcaccgcttgactcgtttgcccagaaaggttgatcctgtgtggttgtatccacgcccgctgcggccggatctagatgggcgtcgttggtcggcgcaaaggcctccgcgataggagatggtgatccggtattcccagattcaacatttatcgagtgagacacgagatcaatttgctcattttcggtcggggcgatggcattttcagttgagttgaagacatcaagactctccgcatcacgtgtggcacctgtgaatgctgtttcctctggcaatggacgtacagcttcttcaacaaaatttggctcgtcgctatcctggatttgagtagaggttgaggcgagctctgagatattatgaggggtggcctcttcggtggagggcagcgtattgctcaggtccttctcgaaggtggcccagggattttcagaatcggcattgtctgcgtccgttcccgggaacagttcgtcggtgggagtggactgagaggtatatttatttttagaagtgtccaatgtaggctcggatgccgttgtttcctctcttggaggtgtagtctctcccacaaacgtcgactccggcgctgtttcttgttcaggtgcgacagtgggcacaacagtatctgagttttcggtatgaacagaaggaaacccgtttatgatggtgggaaagctattactggtctccgcgccatggactgaaggtgcttcaatctgaactggttgcgcgggttgagtttttggcagtgtctggcttaggacggtatctgcattttcaatagatggcgtagttgtatgagtcgctgcgatcgtctcatcggggacatgactgctcttatcgacggaatcggtgtctaggcacatatcctggtccaccactggtgattcattgttcactagcacgtctaagctcgtgtattgaggctgaatcccatctacctcatcggatatatcccacgcagagaaatcctcactctgtggcgatacaacatcgtctagtgacctgtcctttggcccgtccgccgcaatcgggtccgacaacccactctggatcgtaacaggggaattattgttatcgggccgtgatgccggattccatgactccgaatcattctcggtcgcttggtgcgccatatgtgcaaagttattatcgattgccaacgtgactgtagatggggggcgcagtccgcagggaccaacctgacacgtctccaatgacgcctcaggagatcaacaatcgtaaggaaaacgggggtcgagggcgtcaacttaagaatccattaaacaatgtagatataacccagagcaaaaaactcaaagaaagaaatcgaccatgaacacatcagctgatggcgaagggaaaaaccaagcagtcggattgtctgcgacagcgaacgtcgatctccgcctatgattcccccgggggccaaatgaatgcgctgagtcatcaggatgctgtcccgaataggaaaaatacaaacccgtgactcggagtaagggatagtccggctctcttatgctcacataaccttaaaagtgaagtattacgtcagctcgttatcgccgcgaattatgcacccatgtgattgcgtggccccgacaaggcagtcctcgaccggtcttcaaaaggattcggtggttcttcggtttatatatctcacaattttttatggtagtggcattggctgcattctacacaaagaaacggttcattgtgaccctagcagcatccctccactctttcatcatcatgctgcatatgcgttttgaccaataccaccgcacatgataacatatacttgagatgaaccttcctttgatgcaaggcccaaaattaccaccttggatgcaaccagcaatccatttgacttgaatcataccagcttcccgagaatgccttcctcatccgactaccaacaccccctagaccatcccgatgcgccggacgccttctcggactcggacgatgacttggatctagaagagctagaccccagcacgacatccccccaacagtcccgggattctcgggactatactggccgcaaaagaagctacgggccgggtattgcgctgcgcaacttacgtgtcggagcggcaagtcggtggagacgcagtgcgtccggacgtggagacatggaggatgataccgatgcgcttttagagaacggggagacacaaggcttgggggactcacatgcaagctctcggaacttggaggatgatgacgcgcctctactagatcgcagaagctcgactcgcgatttggacgatgagcctgccaagcaaggcagccgcttgcgcttcccaatattcaaaattcctgcattcctacagggcacatcaattcgatttggattaaatgatattccctctgagaaccaacctccccgtgaagtacttgtcggacaataccaggcggctaagtatccggctaatgtggtctcgaatgcaaaatacacaccctggagcttcctaccgagaaccctttacaacgaattctccttttttttcaacatctacttcctccttgtcgctttatcgcaggtcatcccggtactgcgaattggttatatgtcgtcttacattgcccctttggcctttgtggtttcaatatcattgggtaaagaggcacttgatgacattggtcgtcggcgacgagatgccgaagccaatgcggaagaatattgcactgtggcattaggaaggtccaacgagatggaggtcacaaaaaagtcgcgagatctgaaagttggtgatgtgctcaaagtccgcaagaaccaacgccttcctgccgatgtggtaattctgaagagcatttcaaatgattcaggcactcctcgtcattcattaacagaagaacctatccctgggacgtcttccgacttgctcgaaccaggtcagggatcgtccgaacccacaatcaacaccacattgaagaatggtgaagatgttggagattcaccctcagctgatactttcatccgaactgatcaattggatggtgaaactgactggaagcttcgtctgccttccatgctgtctcaatcgcttcctctgggtgatttagctcgactacaaatcacggctagcgctcctgataaaagagtcaacgaattcttggggactattagcttgggaccgcccactgggctctacgatgctcacgttgacaaatcatctgggcctccaaccaatgaaggaacgcctgcgcctgtggaaaatcaatcagctcccttgacaatcgacaataccgcctgggccaacactgttcttgcgtccaataccaccacttacgccgtcatcatctatacgggatctcaaacccgagcttcgctttcgacttccgcttcccgttcgaagacaggcctgttagagctcgaaattaacaacctcaccaaaattctttgcgccctcacattcactctctcaatcatccttgtcgggttggaaagattccaaccaacaaacgacaagaaatggtacgttgctatcatgatctatcttattctcttctccacaatcattcccatgagccttcgggtcaatctggacatggccaagtcggtatacgggcggttcatcgaacgggacaaggacattccaggaactgtagtccgcaccagtacaattccagaagacctgggaaggatcgaataccttctttcggataagacgggaacgttgacccaaaatgagatggagctcaaaaaaatacacgttggcactgtctcatacgccaacgaggcaatggacgaagtcgcctcgtttattcgtcaggcttttgcgttttcgggcaatgccttgattaccccttcaactgtctttggtactcaggccggacatgccacagcgccgcggacaagaagagagattggttcccgcgtccgggatatcatattagcacttgctctctgtcacaacgttacgccgaccacagaggaggaagacggccggaaggtgacgagctatcaagcgtcatcgcctgatgaaatcgccattattcgatataccgaagaagttggattaaagctagcatatcgagacagacaaagtatcgtcttggaatccaccgactccaagcaggttgtggtccgcgctcggattctcgacatcttcccattcacatccgactccaagcgaatggggattatcgtccaattccagcacgatgaagacatacttgaatccagcaaagatgatagtgaaatttggttctatcagaaaggtgcagacactgtcatgacaactattgttgcagcaaatgactggcttgacgaggagactacgaacatggctcgggaagggttgcgaactctcgttgttgggcgcaaaagaatctccgcacagcaataccaagatttctctgctaaatacaaacaagcgtcactgtctttccaagggcgagatgcaggcatggcgaaggttgtgagcgaataccttgaacaagatttggagctttccggtgtgaccggtgtggaagatcggctgcaacgcgacgtcaaatcctctctcgagctgttacgcaacgccggtgttaagatctggatgctgacgggtgacaaggtggaaacagctcgttgtgtcgctatttctgccaaattggtctctcggggccagtacattcacacagtcaccaaagtcacagacaagtcgactgcccaagaggctcttgacttcttgcgcaacaagactgactgctgcctgctcattgatggcgagtccttgaacctcatgcttggtcaatttaaaacagctttcatctctgtcgcggtgctacttcccgctgtgatcgcgtgccgatgctcccctacccagaaagctgagattgcagacctgattcgccaacacacaaagaaacgtgtctgttgtatcggagatggcggtaacgatgtctcgatgattcaagcagccgatgtcggaattggtatcgtgggcaaggaaggccgccaagcatctctggctgctgattttagtatcacgcagttccaccatattaccaagcttctcgtctggcacggccgcaactcgtacaagcggtctgctaaactagcgcagttcatcatgcaccgtgggttgatcatcagtgtttgccagactatgtacagcattgccagccacttcgatcccaagggcttgttcatcaattggctgatggtcggctacgccactgtttataccaacgcaccggtcttctccctcgcctttgatcgggatgtcgacgagcgtcttgccaatctctacccagagctttataaagagctcaagacagggaagagtctaagctaccgctcgttctttggctgggttctcatttccgtctaccagggtgcagtgatccagggtctctctcagatattgttggataccatcacagggccgcgccttattagtctttccttcacggccctcgtcctcaatgagcttggcatggtcgccacttcaatcacaacatggcacccggtcatgatcttttgtctgattggtacgctgcttgtatatgcaggcagtatccccttcctgggcgagtacttcgaccttagttacgtgattacccttgactggttgtggcgagttttcgccgtgctggctgtgtctctggttccggtctgggctggcaaaatgatcaaacagtcgtggcacccgccaagctaccgaaaagttcgtggatagagttgctttgtcatgattttggtgtatcatagcattctctcgcttggattttgttatatctctcttctttcataccctagctaccaccggtctagtatcatgtggctctctgtatattaatcttgagcgttttcttgttgagcgcatcggcattgggctaggtacttccatactagattattcaatcatttcagtttcattattggaattctgaccacctagacagagtacaagttcacatagtgtctatattatctccatcaactcttccggaggatatatattattctcattcatgctatgtatcttcgtcatgaacttgaataattgtagcagtcactccagcaattaaaaaagggcatttgaaaccatatatacaacaagatcgcagatggatgttgtacttacatatagtactccgtagttggattgcccttagcaggcggatccccagggccctccaatgacgttacgcagaatcgataagcaaacacgtgaccaccccagtcaggaaggcggtcaatccatatcgaatcttttttttttcttcggggtcaaacatctgctgcatagattctaggatcaaccacttttcggttgctaattcctcgcccgtcatgtctgacgaaattgtctggcaggttatcaaccagcaattctgctcctacaaactcaagtgagtattaatcggagctgctggctatttagtccgcagagccttttatctccgttatatatggatcgaaaaaacaagaacctcccattaaccattccaaccttctctccagaactacgaaagaccaaaacttctgtcgcaatgaatacaacgtcagcggtctgtgcaatcgccagtcctgcccactggccaattcgcggtatgcgacggtgcgaagcgatcccgaaacgggcgtcatgtacctgtacatgaagactgtcgaacgagcccacatgcccagcaaatggtgggagcgtgtgcgcttatcttccaactacgccaaggccctcgagcaagtcgacgagcgcctcatctactggcccaagttcttgacccacaagtgcaagcagcgtctcacccgcctgacgcaggtcagcatccgcatgaagaacatcgccaaggaggatgagcgtctcggagaaaaggttgtgcccaagctggcgccaaaggtccgccgtcgtgaggcgactcgcgagcgtaaggccgagtctgccgctaaggtcgagagagccattgagcgtgagcttattgagcgtctgcgcagcggcgcttacggtgatcggccactcaatgttgaggagggcatctggaagaaggttctccgtggtcttgagcgggctggtgacggtgagcgtgatatggatatggatgacggcgaggagattgaggaggaggaggaagagggtgttggtgaggtcgagtacgtcagcgatctcgatgaggatgaggacctcgaggatatggaggactggctgggagttgactcagccgattccagcgattacgatgacgatgagagtgacgatgatgacagcgaggacgacgaggaggctagcgcagatgagaagaagcccaagcccagtgccaagcggaagcatgttgctccccaggcgaagcctcgcaagaagggtcctcgcatcgagatcgaatacgagaccgagggtgctggcaaggaccagatcatggcatgatttcatcgatgttggaggatttgggaaaagtttacctgatcttgcatggtgtttgggctgtcaattcttttgttttatattcttattctgtgcttagtgatcgggcatcatacccttgctatactgcatccactgcaactcacgatcctagatcttcgaatgtctattttattttcaattctaccgctatcttcaacataatttattgagccaagacctggctgttgctttatttaggtgaaacacgtgatcatgtgggccaatgaatgccctccactatcgtcgcctttcattctcctttaaacaacttcacctcaccaggagccggttcttctgttaatatctcccttagtaatcattccaatcatcataccttgttcaactctttggctctgaatatcttgcattcggtccccacaagtaaagctccagctccgcgccaaccccaccccgtatcgaagctgccattctgcagacggcgcattactcaaccaaaccactcggctgctgcaatatgagctcgtacctctcatccttgaccacgtcttcggccatctctggcctgggttcgcggctcaccaaccttcgccgtgccattactctaggcgacgagggagacgaccccgacaacgaagactgctcccacatctccaacgcccttcgagcctactacactgaaaagggccgtccattcccaccatggctcccacaagatcccaagggcccagctccggcaccctcgcgcgcgattgcgacttcacagctaccctccggcggctacaaccaagggtcccccgccaaccccaactccggccggagcggtggtctaggtgacctatggggtgattctcccacatcacaagcatcaatcccacagacagctagtcttcgtcgcggacgtggtgcaccgccgctctcctcggccaacagcgcgccgccgggtccggccatcacactttcccagtacgattcgcctggatcgggtccatctggagcgcggccattgcctagccaacgagccgggtcgcatcagcctgttcagaatcgtccgaatctcgaccgtgctgggtcgggtggtggttcagcccaggagcgactgcgggccagattacagggaggaaggtctcctagtcccaatattgacccgagtattcggaagccagttggagcgtctgggaaacggtgagagtgctgaggcttacattgcatagtggagagcatggcgtcgaggagttattttccaatgtttaccgaatgtttaccgagtacatatctcaagaacaaatctcattcaacgatagtcatatggttccaacggagtagatctttaccggatacattcgtatgttttgagaattcgcgctagtttgactttcccccacgcttcgggggcatattaggctgagttcttcagacgggcagagatcaccccaccgtcatccaacgagctaagatatgcaatcaacccagaattgcttagcagcagccaccaatatcaagccacagccaatgaatggctatctcggcctgcgatggggaaaatcccgcattttaccccgacgtcgtcatcccgtgtttggagggccgtgttgctccagcaagggaacataacgcaattcggaaggtagtttcctttctctcttcaaaaagttgatgggcccaagcctagatatcaactcgactaaagaaatcatgagataccccagtttccccgaaatgtcgccgacggcagtcctctccacggggaccccaggccagttgaataccgagtcatgcaacatagagtcttttcagtccctggattatctccgaggtgtggcttttgtcatatgaaattccttttcgtttgtcgctaggtaataccttcggcttctagtgtcggaattgtcttcttccgcaggactccctccgtccaattatacgtctataccgtgatatatgccaacaaaacgggaagccgggaagaatccagaagtgccagaccacgtttgaaagtgtgtctgaggactaattccgagtattggctgttgtgtggcctggaatggtcgacataagctttgatggcaaacgattcgtccacaatcccgatggcttgattccctgtcactccaatccctgctgtacacctatagtacactgcgtattccaggtttagtcctgtttttaccttccggtgagaccgcattttcgttcttccccttctcctcaacctccccggactggtcctggatctccacttctctcacatgggtaagtaccgagtgtatactccaggccgagcctataggacttggccaatttctacaacataacgcgtccctgagcggttttttgactttgcttttttgccgaacccccacacggagcctttgtcgtgcgtcataccaaccgtcgctatagcccatctgcacggcctcaaatagtcctttctcctcttccaatggctagtgtcattgcttgttccatacttctctccattccctattagtcctggtccctgctccggtagagcctggagtgacagttccactccactattatacatatcctttagtagacccccaactcatatcctgaggtctcgttcatcatggccgacctcaaagatgtcgaggcacctcagaacacgcacagcgaagacaaggacgccgtcgcctttgagatggacgatgtggcggaccaaaagctccaaaacgggctgagcgaagccgccatggatgcggaactgcagcagctggaagagcaggtgcacattatccccaaatcccgcctcgatataaccatgtccaatcctgctgcctttacctacgtcctcgtcgccttcgcgtccatgggaggtatgctatctggtcttgaccagtcgcttatcagtggcgcaaacctctacctccccgttgatctaggtctgtctgcagcagataacagtctagtcaacgcgggcatgccactcggagccgttaccggtgctcttctcctttctccagcaaacgagtacctcggtcgtcgtatggctatcattgtctcctgtattctgtacacaatcggtgccgccctggaggctggcgctataaacttcggaatggtgttcgcaggccgattcattcttggcgctggtgtcggtttggagggtggtactgtcccagtctatgtcgcagagtgtggtatgttttccatcactccccatcctatctgtatacccagttctaaccccactctttaatagttccccgcagactccgcggtaacctcgtatccttgtaccaactaaacatcgccctgggtgaagtcctcggctacgccgtcgctgcaatgttcgttagcgtcgaaggaaactggcgttacatcctaggctcctcgctggtcttctcaacaatccttttcgtgggtatgctcttcctgccagagagtccccgattcctaatgcacaagggacgcgaggtcgaagcgtacgcagtatggaagaagatccgtggattcaacgacctcgaagccaaagacgagttcctcggaatgcgacaagccgtcacagccgaaagcgaggaacaagcccagtcgaagaactacccctggatggacttctttactgtacctcgcgcacgccgcgccatggtctacgccaatatcatgatcttcctaggacagttcacaggcgtcaacgcagtgatgtactacatgtcgacgctgatgcaggccatcggcttcggcgacaaggacgccgtcttcatgtctcttgtcggcggtggggcattgctgatcggcaccatcccggccgtgctatacatggagcgatttggtcgtcggtactgggcgaatgtgatgctgccgggtttcttcattggtcttctgctcgtcggtgttggctacactatcgatgctgataagtaccccgccgcggcacagggcatttacttcacaggtattgtgctgtacatgggtttcttcggctcgtacgcttgtttgacgtgggtcgtgccttccgaggtcttccctacatatctgcgctcgtatggaatgacgacggccgacgctaatttgttcctgtgctcgtttatcgttacgtacaacttcacgcgcatgatggagtctatgcagcggattggtctgacgcttggtttctacggtggtattgccatcctcggctgggcttatcagattatcttcatgccggagactaagaacaaaacccttgaggagatcgaggagattttctcgctccctactgctgttattgttaagcggaacttgaagcagacggcgcaggttattcgggacttgtcgcgcttccgtcttaagaaagtgttttctcctgagccgtacaactaggctagtaatgcatatttgttggcaagattgaataatgagaaatggaattggtttttgttcatacaaagtttgccattgattgcatagttaatggttccattttctatcatggctgagtagatataggcaaagctgactatttgtatctctctcgacgtgctaccaggatactcgaggaaaggtgtcatggaatgccctcttgggtccaaggatgaggaagtttgtcgacactccgctgggtagaatcgtgagatatatacataaatgtccggaacgcggagcgactaaaattttccgcagcgccgatacatttacacagatacgattcctaggcaaaataccaaaattctcccaattgaatgccgattttgcgattggcaacaacgaatgaatgaatgacccatggcagctacgggtgggaagaaatgcaagagaaattaaaaaaatttaaatgagctctgagggtttgtggagctggtgggtatgtcattgtggtgtttgggagcacggacttcaggctttggtgtaacgagtattggttgaggagagaaagagaacatcggaaaggagttttgcatgtcaaagaccaaattgaaagtgagacatgatgatatggtggccgaggcatgttcttgtccacgatggcagttactatatacaatgtaattagattgcattgaaatgaaataaaatgaaccaatgattttacggtaccccatctggacacgcccgagaagtataaatcttattgcgatgttgtatattcaatcaagtcaaagggatccttcggtatagcgccttgcaactcccgatgcggtaagagtccggcccaactccatgccattttattaagatacccttttgaaagagcgcatcttttgggcaaaaacaactgcgtgaccataaatatttgctaacaattaaaacggggaaattatcaatttaatttgataaaaaaaaaacaatgggacgagccgggatcgaaccagcgaccttgcgaacttcagtcgcacgctctcccaactgagctatcgtcccatttaggatgatgatcgaggaatagttatgcatcatgaacagagtatagctccccaggtagcccgtttttgtctccgccttcttcactcatttctctagatcctaaccatagtcctacgtttgtatgactcctatcataatgaataattttccacatgtttctaggacttgtatatgtaagcaattatcagttcataactatagatcagcttaaaataacaagtacataattatgtactgtcgtctcacaacctgaaatatggtatccgtattctaccagtgcagtcagtgccaacttatattatctaattaagcctaaatttttatcccaagtggttatttctgcatgagctcgtgtaggaatattgctggtgttgaaagcaccaactgcatatatataacagtttctttcctacgtctttctatggttctcaggccttaatacatacattgcatcgcttagtagattgagttactacgttaatatcttccggtagtattcaaagatattaggatgcacctataataggcactcgtgtactgcgagatggttatccattgcattcgtagatgccgtttagaaccctaggaaagcgaccatcctgtattatttaatcatggtatcaacctggtgatcttcttctatcccgaatgggacgatagctcagttgggagagcgtgcgactgaagttcgcaaggtcgctggttcgatcccggctcgtcccattagtttttgcttgtttttgtcttctattgccttctctatgtcgatggatggcttacgtctcgaataacaaggtcgagcggagacgggtagacatgcttactttaagattttaccgcggctacctcctgcttaagtgctattttcgaatctagtgaacatctctattattcgcaaccactccagcctcgggatgatccctctagaacacatctaccccaagatggaaagtgagtataagtacaaatataacaagtataaacataagcgtacagtaggccaacaaaccgccaacaaaacatgagtatgtcgggtgtaacatcaatccctcaaggcttcaaagtccgcttggattgacgaacatataccgtcaactagtgacatttcctcctctactggcacacctaaggctccagcttgccaactcaccgtgcacaccaagcttgcccctttgacactgatgatgttgaaaacaagcggggcactagtaacatttccaggctgcgagaacaccatcttgacgaccttgcacttttggactgacccgtcactcgagttttcgaaggcaagtaaattgctcagctcgtacgaggagtcccgctgctgtccaagtttactcaatgtccaatttctgatgctgggaacgtatctcaataggccgattgcttgatcttgcagtctcgcaccgcacgcagcgaggtttttcgtcatcgagctcgcggctgcccacatctcctcggaaaaatgaggctccgttacattcggtgcccgtggatgtgcctcgtaataggcagaaacgaaaagaccccatgtgagaccaggcgtcccaatagacgctcgcatgtcaaccggcgtccccgagacaaaattggttacgccagggctaggaatggccctgcttagcgcccggacgatcatctggtgcatcgttgccgtgagcttggtgtcatgacttcttgaagtctgcagggccctttggaccagcggagccttaatctcgaggagtcttactctgctctggagagcggctgccggatcgaagaacatgggtgacccaatccaagtaccggcatctagagtgctggcagatgcgcggagcccaagaaaattggctataaacttcggcaagcaaactgcaatcaatggctcgaggagaaatttccaagatataggaagcctttcgggtgtgtcaaacggtgccggaagcgtttgacttggcagagtcactaagaaagagggtttctcctccatgccagtagtctggcgccatgcatcgagaaaggcacgatggaatgcaaccccgaccatgccgtccccgagagcatgggagaacgcaaaggcgataaagcatcgcgtcgctgtggggtcttgcggcgataccaaagggaggaccacgattcgccaaggtgggataccagcaggccatgggcggtcaaggatggctggtaagatcttttgaattgttgccgtatcgccattggtcctggcttcgtcttcgtgaattatagacaagtgatcgtgcagatcaatactagaaaccgcttcgtatgttggcttgtccgtctgcttcgccttgatgaccacgcttaggtatgggaatttctcgatgcagtgtctcaaaggtgcaataaatgactgagcggagtggacatctatattttcactcgcaatttcatagattgctcctatgacgagcgcgttgtagaagccgacatcttcgcgactaattgtacgacattcattgggacctgtgttccggttagcgctacggatatagctcaagaagtatatttcactaacttgcaagtctcatgaacgttgtggggagcgacattttcgtacaacgtggtaaacgtatctcccccgtaggctcaggctccagtgatgtgaatttataggatacgatttagcgtgcctatttgagtttagcgtggtcctgccattagcgttaccaggataggaacaagtagaagttcgtagagcgactacaaaactaatcggtatatcaaagcaaaagagtgcttccaaggttcaaatctattattcatgcagagtaacggatgaggcccggaagatgcataaataagttgctaaattaggcaatgagtgtcacccgcaattgtcacaatccttaagtaatggtgtttttatatatgaatcgaggtctttcgcaaactggagtggctaggacagcttggggtttcttgtaataactgtataaaatttcgttcgagctatagaatcatctaggcaacactatcattgtagacctaggacaaatgatctctgctagcaatcttgatccagaaatcatgatgcaccaacaaggctaaattctcctgtttccaaactggccttgttccgttgttgatcttgggtcggaacagacggaagaactaccagctagtcagcgagaatgaatagtgaccttcaagaaaaagaaacatacctgagccaagagcttatacgtctccaaaagtgcaatatttttgcctaaacagatgcgagtgccatatccccacgtgagaatacacttgtccatcaaggcagcccgatctggatcctccaaccagcgctcggggcggaattcatgagcatcctcgccaaagatccgccgattccgatggacaacgtatggattggcaccaatctccgttccagctgggataaattggttatgaagtgtcatgcctccttcagagacgtagcggggaatgatcatcggggtggagggctgatagcgcattgtctctttgtaacaggccgagaagtagggcatatctttgatctcatcgtagagcggaaccggatggctgagaagtcctcgccgatcataatcgtcaatctcggcgaccaacttctcatggacgcctggagtttggagcacgtatcgtagaaatccgcagaagaatgcggctgttgtatcagatgccgccaccattaacacaaaacattcggttttgacttcgtccagcgtaattgtagacccatcggggttctttgcgtttaggatattgtctaggaagtcaccctgctgtcgttgtttgggatttttcaatcgctcttcaaggagccgatcgcgaaactagtcaattattagcgttatactacctttgactgaatgccaaggtactgagaggtgtataaataccgccatgatctctcctgttcctgacccatctccgggcttgggcatgaaataccgtctcgtgatggggttctccaaaaatggccgagctagccatggcaaagccccaacaattgcagcaaaaggggccattttatggaagttttcaatcaagctctccacatcacggccttgagtgatgaatccaatcggttcaccaaaggaaagctggcagatcatgtcgtaggcaaaccatctgtccgaatcagcttcttgctcactattcatatctcatatggcggagtttactaactgcgaccaagcagcaaaatccatttcttgaccagtgtgagcaaacctctcagtcaacacgttcgtccattggaaaatgcgctcatcaacctgaccctcgagtgatttcaagttcgtcaacgtaaacgaagcagccactctcttgcgcttcatagcatgctcatcatgcttaagcgtctggaaaggcggcgcgatttctcctaaaaccccaactgtatacacatcagttttatctactcggcgatgataaatctggggcaaaaacataggatcatccacggccaatagattcggtgcggcccgcacgatagatccgtatttttcatgatactcaatgcctatcgtatgcgcttgtttggtgtgtaggatccatagtttgaagaagtcggagatggaggcccagaaggggccagggaatccgcgtaggggatggaagtagcggttgtagatgccccggtagaggatgtaggttgcgagcgcaacgacgccgagaaggtataaatgcattttggttgattaaataaatgcgcaattcgtatagtttcgagaaatgctgggtgttttatcagtcattttctgacctaacttgcatatactacgtatgacaggctgatggtcagaaatcagaccgccgttcattggctgagtgagatcatttgaaacgtcaaggagactagaagatgatggttgaattaatctcgaggcgctgcttcaatgttcttagatctctgcgcctaatttcgattatgaatgccaacttttgtaatcgtcgaggctctcccccttaaattgagatacttgatggaaatgggatatcacaaagtaatgatcaattctaatgaaaatggatgaagaagaggaactgtccgaggagaaaccaagtaagtacctacacctggtgggggaaagccttgtacatgacaatcaatgtgttctgggtttaatataggaaatgacgtaaacagaagtgagaactgcattctttgctaagtcctgtgaatagtggatggcagaggtgacctcagtttgtattaattctagtcagagggtttttgtttgagaattgtgatactaaaaatactacatggcagatttaaaggctaaaaaagaccaatatgacaatgacaaggtttatgattgaggctttaggtaactctaatagcagaaaagacgaagacaaacaaattatagagtcagtttgctctccacagcatcggataggatctgcagcgacgaggtctgattcaaaacatccaagaaaggaatatcaaccttgaaaacggtgtagaaccacgaccggaactccgaggcaatcatactgtccattccgtaggaggtgattggcttgctcgagtcgatcttatccaatcccatgagcagcaggttcgagaagcgcttcctgacaagaagaagaattgcttcgttgagggtggacgcggatgcaatttcgctgttggttgagaccatggtcttgaggacaacggnnnnnnnnnnnnnnnnnnnnnnnnnnnnnnnnnnnnnnnnnnnnnnnnnnnnnnnnnnnnnnnnnnnnnnnnnnnnnnnnnnnnnnnnnnnnnnnnnnnnnnnnnnnnnnnnnnnnnnnnnnnnnnnnnnnnnnnnnnnnnnnnnnnnggccgagggtgtggggggggggggcggggatccccgcggcccaggggagggcagatacagaggtagcggaggatgacacagcagaatcctgagaagcaggtgaatcgagcgatgcagatagaagaacggctctgggatcttgcattgtgccgttgctgacgtcaaatccttgatcgagcagtttgcggatggcctgcggctccagtcccgtgaggatgtgcgaggcagaaagacggtcatactcgagacctggggccagtgactttggtccatcagccgaagtgtgggcgagtgcgaggtcgacgacctggatcagctcagcttcgttgagaggctggatacccttccggaggaggagcgcctcgatttccgggttttcatgaagataacccacctccgagatcattccgagaccgatggagacgatgggctttccgacgctgcgacggtatcttgcgaaagcgtcaaggaagccgttggcagagcagtagttggattcggtggctgtaccaacactgcccgagaccgaagaggtcaggaggaagaagtccagttcgctgtcaccgtgagcttctaaagcatggtgcaggttccaggttccttgccatttgggctggatacccgtatgccaagccttatgggtcatggtggaaaagagggcctcactgagacccattgcggcttgaatcacaccgccaatgggcttgatgcaagcggcgacggcggcatcggcatcggaggcattgacgatgtctccgcgaacaactttgacaacagcaccagaggcctcaaggttagacaccagctcacgggctgcaggcttgtcacagccagagcgaccgaggaaagtgaaatgacgagcgccgcgatcgaacatccagcggctgagactgcgacctagaccaccgagacaaccaatgaggaggtaagacttgtttgggtcaaaggtggtgagatggcgcgcatgggcaacttggatgagactggatgggttctccaacgagatcacgaccttaccaatacggcccttggtagagaagaagcggtatgcttgagcgatatcactaacatcgaaggtggaaatgggaactggcttgacagtgccagctcggtacagctccaaagcctcggcaaatttactagaagaatattagttggtgttgtaaaaaaagaatggagaggaaatattacgtgatccaaatgttgcggtagtgttcatcttcgtggtagaagagctccgtcagatcaaaggcagtgaaggtcacgttacgcaagaacatgcgcatatccaactgtccggcatcgataatgtcgcgcttgccaacctccacaaagcggccaaagttggcacaacattgccaagtggcatgcagcagatcgcctgtcagggaattgacgacgacatcaacaccccgaccgttggtggcggctagaataccggcaacaaacgaatcattccgggagttgaagatattctcacgaggaaccccaagttcgttgacaagataatctttcttttcatctgtgctgacggtggtatacacggtcgctccgcgttgaagagcgatcgcaatagtggcggttccaaaggcaccggcaccggaatgcacgagaatagtttcgccggagcgcaggtgagcacgatcatccagggcatatagagcagttccatagataacaggcagggtgggcatcacttcaaagctctcgtggggcagcatcttgagacaagcccaggccgggacccgctcgatggtgctgaagctatttggtgccaggacaacaacgcgatcaccagcaacgagattggagacatctgaagcaacgccacggacgattccactgaactcaatggcagccgtgcccttgcgggtttcgatcttgccagacagcgtgtagatgtctttggcgttgagactaacagccttgacttctatttcaacctgaccagatggaatctcggtggggggattggccagacgttggaaataaattgagtcagtaatgccaacacgcttgatggcaagctgagcaggggacgcttcggccagagtcatggtgtcgacctcgtcagttctgcgcttgctgaacagatcattgagtgtggtatcgggcaggaatcggctcacgtggaggagaccattgtgccagacaaactccttgtcatcggccgtgtcctcgaccgtgagtatgtgctcgactttcgtgcaaatggcatcgcgaccggtgccgctggggtgctttccaacgtccagaaccacaaagcgcagagctggttgttcgagcatcagggcacgcgagagaccgctagacagagagagatcaggagcatcaccagtcacagtggaggcgcccgtcagccaaatgagctctgcagcgttgtccgtgacgatcttgaaacgcatcatctcctctggtgtcatggttgggatgaagggggtctccatctccagtagggagatgacagtcgactgcgagatcatctcctcagtcacttcatcaaggcgtgcagaggagatgtcctccgcgacaaagaactggtggagagcattcgccatcttcgacggttgatcatgaagcaggaccacgcggcggttccatttgcgctgtggctgagaagaaagaacaagagtgattccaaagggtagattgaatacagtgcatccagactgaaccagaatgtcagacgggacactctctgttcgggcaacaatgatgccattcacatcgagcagactcagaaactggtccaccttcttcaacgacttggggtatgtgctatgaggaagcaaaacaacgtcgtacttctcctcgatctcctcgatcttctcgctctcggcggtcttccattctcggatgcgagggaaatcggtcttctcatccaaaaactcccgccatccctgggtcttgcagtcgcatcccttgccgagctccaacacgcgcagtcgaggattcttgtgcgcagccagatccaacaaggcggaaacaacaccaaccttgccattgtccgccaaatcggggtggttgacaagaaaatcggtgatgacctcttgcagatgaggttgatcagcggttgtcagtcggctaaggtctggcttccagaccactcgcaagcatgggtgacggcctgtgtcggagtcttgttcagccttgccggtgtacagagacaggcgaacaccgcgcatgttgatcacagaagacccagagccatcttgcaatgaggcatcaatcgacttggttccaaacccggtgctctgagacagagaatggatagatccggatgaattaacactctctgtgctgggagtgttaatctcgcacaggtcgaggaagacgggtagatgggcgcgaagtcggttgaggttaccggccgtgccacccattatggcggcctgcaaacaggcatcgatggtcaatgggtgaacagtgtagtaatcgccttgatacgatgttcgggcgacacgttgcttgataaccgtttcagagacggcagctgggttgattctcttcttgtctgtcttcatcgacaccagagattggaatgtgggaccaaagacaagcccttcctcggccagcttggagtaccatgggcccattgaccattgctcatattgggcggtatcgactgtgatagccggcaaggactttcggtcgagtcttatgcagcctgtgcaatgtgagactgcggctccagcctgccacgatgagatagcaaagtcataccaagtgctggaggtggatgccttggaaatgcgagctggggagacggttgtgtataaatcagcctgttgatgttcatcggcgtgtacgatcaatgcggaggcgatgttgacgttgcgcaaaacaaatgatgagtcagcctcggcaaggttcttgatctgtgaaatggcctcaatcgccatggaaatgtatccagcagctgggaagacaacctggctctcaagcttatggtcattcagccagggcacctcgttcagtcgcacagtattcttccagactcggtcaacaccgttaccagcggccatttctgatcctagcaattcatgacgcgggtaggggcgactgcgaagatcactactcagtcgtgactctctccacagcagctggctgtagctccagtggtaagtaggaagatcgggaataaccttggccatggcagaagaagtatcgttgacggccatgatgttgatatcatgtccacggatgtaaagttctccagcgagggtctttaggcagatatcggcgtctttaccacggacaagggtagcgctgtatggcgcatcgtcgatagaatattgcaataatgttcgaatctgcttgacgggcaattgtagggctgaatggggtccaatctcaatgagatggcatttgcccttctccaggattctggtaacggctgccgaaaactgcacggagttctcgagattctggcgccaatagctgtgaggcaatactgctgttgtcttacggctgtaccagttgggcccgtctacacccacactcgaaaagaactggatgtctttgtcgatataattggcgggaagagttggccatgcctgctcaataaggcgttcatactcttcaccaatctccttcatcatataagagtgataagccttgccacctgtctgtagtttgcgggcgaattttcctgcctgggaggctgtctgcaagagggtttccacaccggagacgctaccagagattgtcacactctcaggggaattgacacatgcaacaaccacttccttttcgagagaaagctctgaaatcaactctttggcctcttctgcgctaccgccaagtgccatcatggatccttgagatttgagctggccgacaacatgtccccggtaataggcaatcatgatcgcctgggcttcactcaacaatccagcggcgtatgctgcagcaatttctccagaggaatgaccggccaccatttgaggagcgacgccccagctgttaagtaggttgacgagaccgatttgcactgcagtacacagaggctgagagaatctcgcatcgccgacgcgactggtagcagcgggctccattaaaacatccttgatcgaccatgcgggtgcctcaggcagcgtctgcagcacattatcgaggtggtcgatggtgtcccggtaaatcgggctctgctcgaacagttgacggcccatctccgcccattgagcaccctggccggtgaaaaggaaggcgatgtccaatgccggaagggttttagtgaccaatccctcgacgacgagatcagttgttgcagtggcctgactggcaaagatataaccacgctgggacagcttcgatcgacggtttgcgagtgtatgggcgaggtccacaaagtcatagtgggcgccgttgcggatgctatagctgagatcggtgatccgggcctccaaagcttcaacggtagaggcagacagagctagaaggtatttcttctctgcaggttggttatgtgtgattgccttgggaatcttgttgactgaggccaaatactgaatcggatcttccagaatctaccacggttagtatcgcagtattttggattggagagcaaatcactcactgcatgggcatttgcaccgccataaccaaacgagttaatgctgacacggcgcatggcagatggccagttggtaagtttggtcacgatttccatgttccaatccgccaatttgactgtctggttagcatcatgactctcattaaactcggatacaggactcacgcttggggttcaacttggtcacgccaactgtggcagggatagcctggtgctcgaaggtgaggattgccttgattacagcagtgattccactggctgcctcactgtgtccgacatttgttttgttctaggtttcattgttcagcagaccgcgcatttatggttgagttgaaatactcacagcaccaattagcaaaggagatcttcccttgcgcttgaagacccggctcagagcttcaacttccatggggtcaccgacggcagtaccagtaccgtgacattcgacgtagtcagtgtcttctacgaagagtccagccatgcggtaggccttgcggatgacttctgcctgtcctgaaatgctgggctgagtgataccggaggttttaccatttctagaacagttagtatgcttagacgcatctggatcgagaatacatacgcattgacggcgctgccacgaatcaccgcgcggattgggtcgccatctcgcagagcagcagacagccgcttgatatacaaagcgctgacaccctcagcacgaccgtagccatcggcactcgcatcgaaggtgtggcaagtcgaggttggggagagaacgcctcccttcatggttccgagatgctgctccgggcccatgatcaagttggcaccggccaccacagcgccttcgcattccccagccttgatggcgttgacggcgttgtggagacaataaattgatgatgaacaagctgtgtcgacagtgaaactattgatcttgtcagattgaaagaaaagtccattgatagctaatgaccacatacctaggaccgcgaaggtcaaagatgtagctcagacggttggagagaattgcagtaccggaaccagtggcactgtatcggtgcagcgactccggatctctggcctgcatggtctgaaagtccacggtgaaattaccgacatagacaccaatgtctgcgccggcaacctgcttgagggaaacaccagcactttcaaagcattcataaacaacctcgagcagcttgcgctgctgagggtccatgtatgtggcttcaagattgttgatcccaaagaaggagttttcaaattgacgtacatcctccttcaagaaatagccgcccttggtattcatcacaccggcacgatcgccttcggggtggaagaatccgtcggcattgaaacgttccttcggaatttcgcattgaccagttcgctcattgacgagcatctcccagaagtcattgggggaggagacgccaccgggaagtcggcaagctttatcggttagctctatggactcgagaagatggagtaatacttacccattccgacaatcacaatggggtcattggttggctcgggtccattggaaagagtagcctcgagagaagaaacgtcgatagaacccatttcgtcggtgtaaacgtagaatagaattgtggttgggaatggaattgtcaaattcttgaggattcggaataaacttgcacttttcaaactgtgtatatatatcccctgtactattctatataatctctaaatgtatacagcaaggatctgaccaagggtgcagtgacaaagtgacaaggctcacgatctcaccgtcagacgtcaggcttatacgcggtcagatcggtcagatcgacctatactttaaccctcccacagggcaattaagcatcggcaaaaccaaaatgaagtccgttttaattacagggtcagttttgttttgtttgttggatctcccaatattgacgaacgattcagttgtggaaagggaggcatcggcgaggccttggctcttcagtatcgcgctcgaggtacaactcacattcattattcatgtgcaactcattaaaccaatcaggttgcactgttctggccactgttctgccctgggaatctagagagcatctttcttcggttggcatcgcttgttttgagttagatgtgacgaaagatgactccgtccgagccttgcgcaaagcagtcgaggagaagattggagatcgactcgatattcttgtgaacaatgcgtaagttttcgtgacaatcaatcttcgatttggtttatttcaatttaacaatatatagtgggatctgtaagcttctgttgatgcagtacaggatgaaataatactaagaagcaggctatacaatgaccgccatcgacaccgatgttaaacaagtacaacagatgtttgacgtcaatctctttggaccaattcgaatggtaaatatcttccaccccttgctaattctagccaaagggtgtgtcgtcaatattggctctgtcggaggggttgtaccctacatgtatggctgtatgtctatctgaaatatgggttcggctgaaatccacaactgactgcaatgtagcttcatacaacgctagtaaagctgcactacatcactggggaaatacactccgagtggagatgagcccattggggtctgtcaattatccacctctctaccttttcgctcgctaatcgttcgaacagcgtccgagtcatcaatgtaatatctcaagtcagtataatatatgagtttggagactaacaacgcatctagattatatctggcaatattggcaccaatatccttgaccgtgattcatcgcgtactctccctccaggtacgtcggcaacccctgcagtttggctcccaaattgtcaactaatgaaatatgtagactcgttctacgctcctctgcaaacggagttccaagctcatgtccaacgagtgcccggtaagctgaaatattgaatattgttcgtgcaaggtaggctgatcaacagatacaaccgatcgcatggtgtatgccaaatcggtggtgcagcagtcactaagagcatgtccacccgcctggcactgggtaggcaatacctcgacccttgtgtggtttatggatatcttcgcgtttcgcactatctgggtaggtttttactcttcgattttggacacatggcatccactaataataacaggactacgtgctatggcctgtctttagtctggggaaattaaagcgcgcgatgaaatccaggtctatctagataaccaatcgacaattactgtctttcaataagattactagtcagcttccaaaatttagttgaactgcggcgagcgagcatttcgattccagggcacatccattgtagtgtttctgctggtttagcttaattccttacataaaaatagggtaatactcaggtataagatatgctttattcaaaatcgaaaatattataatgttatcacttttctggatcgaaataatccatgagtgttttgtttatattattgtataactctgagcatctagtctatgtaaatcataaagccgagattctgttaatatggccattagaatgtatgacgtccaatctagattgagtctgtgcttctgtgtcattcaaaatcccaggtctgacgatctgacactgtttctgacagtctgacatgcaggatgtcactacttttgaaatatataaaaccgatcaaatccatcgctacctaggtaacatcgagttcaaacagctatctccttttaacattcccatcaccatgtctcaaacttccgggtttcccagtcttcgccccgcctatattctcaaggtgtgttatcaaatgcaaaagcatctcacttgactaataaagagatagctgcaagtaggagagggccagcctgttggtatgaaaatactattgtgtacattacatcgcctcggtctaatcattttctgtaggcgcaacatcttcagggtcgacctttgtccactatgtgagtttccagtctcaatctaccagatgaactgattcctaacttttgttcagagcaccccaggcggaagcatctccactgtagagggattttcacctagcatcgatgccgaggttgtatttgctggcgactggttgtatttcgatcccgatcagcaacatagtcggatgaatgtcaagggtgttgcaaggtgggtttatatctcacgtgcttaattatatgaatcccactgacaaatcaatcagaaccactgaaggcgaagtgagcaccgtcaatatcagcaagaaaacatagaactaatgaactggcagggcatcaacttcgcctattcgggcgtttccggagtttcgcccgacttgggagccattttccaaggacaaccgaagactattccattcggattatccagttagttctttgacataaatctgtatgatataatacgctaacacattatctagccatgaatcccacttttgaggttggtcatccccgtctcaaggacctcgagaacaacacttgggttggcaatggccgattttcgttggagggagacaagttatacgtggaggtccgcatctcgcaggttgtttccagcaaggatatggattagatggactctttgtgttgatagtagcatcaaatcagctcctaaacttgccaattgacccatcaatatatatctttaacgaacaacacatacaaaatcaaataaatcaaacccgcgaaggggcagattggccaaaggtcagatgcctgattttgcagggttgatgcctcaattcgcctgaattatgccttatcttagactgtcaggaatcacaggatagagggctcagcaaagtattcaaaaacaatgaaggtattcccatataaatctccgtatgcatctatttctaggcgctgaagctgcgaccgtacaactaatttatgaggtgggaatagcttcaattcaatggtttatatagtcggggatggttctcaacgctagggattcgaagaaactgatattttgtatggtgggaatagcttcaatttacagttcacgggatagagcggtgtcaaaagcggtctataattcaggcatattcaggcatcaaccctgcaaaatcaggcatttgacctttgaccgccctgccccttcgcagatcataacaaaaaccaggcctagggggaccatatcccggtctgacacaatcgagtaaaaatgaataacatttgagtatgacggataagttactctaatgaccacgactcatcccgaattcgcatgaatggcgccatatcaacatcttgaccctgttccctcttcagctccaacgcagtccgtccgtccccaagatacgaccacatattttcatccaggtatttgatctcgtaatcctcaaaacgaggtgtcttgagcgtcttgagcatatgaagcatacttccagaccacagctgaattcggttgttatacttcatccatgattcacatgattcagcccatactgaatgcccatcgtgccaagtgtctacatggcgccgccattgtgtcgttacgctttgcttgggagtcaaagagtgcaaattctcgttgctgatcttggcagcgcactgaagcgcatattcgacttgggcttcgtgctgttggatttagagggtcagctaagcatttcaccagagtcgagctcgagagggattcatacagtaatcaaaacggaaccctgggcccagtttcccgttggtccaccaatgaagaaaaagttggggaagtttggtgtgctcatgctgagatagatgttgggggacttttccagttagccttcctttctctattctctatatctgtaggtggggtattacttttgcccattcttcgcgcatagtttgtccattcttgccggtcacggtactggatatgttagagtcatatgccatactcagtggaaacaaaagaaactcacaagtgaggtgcgaaagcaacatcaaaaccagtggcacagatgatcaagtcgaattcgtgctcaactccttcttttgtttcgattcccttttcagtaaaccgcgtgattccactcgtgatgactcggacgtcttgatagtcagccttttgcaaaacgacccacacattcaagaaatgaacttactgtcttctgtcaatgcttccaagaagccatcgccgggctgctatgtcagcgcacctactttcagaagatatttgtaagaacttacagtaggcctacgacatccaggcgaaaagtcaggcgtgaatagcttggccaggtcctgccggtctggtccaacacgtgccttaatcatctgggaaatcatctcggtcgtcatatcatgcatgggatgatcacgcaggaagattgggaatcgctcttgcatgactccatcgacagatttgcgatattgcaaaaagcgagcaggatcgttacggaatacttctttctcagcctcggtatagaaatggcttccagccggtgcgggcggagctgacttctcaggttcatcgggaaacaagcgcagatcttggaatgccgctgggggaacaatccattgcgtagaacgtacaaacactgacagtgatttgacgtctaacggtgggagtcagcagaaggttatatcagaggggggccataggagcatacccttgacaatttgaggaatgatttgaatcccagatgaaccagttccaatgactgctactcgcttatccttccagtcaatagaggagttccagttggctgtgtgcgtaaggatgccacgatagttgccgatgccgtcaattttaggccctagaaggattagcaccagatcatagatgcagtcaaaacatgagcatacatttccatttattcaatggcccagaaccattcactagaacatggcatcgatccgtaaagcgagagccgtctttgcgctgcagctctagttgccctacatcaattagttatccgtgattatatttgatggtaggaagacaaacattcgccatcatcttcgcaccaagtagcctcgactacctccgtttcaaatcgaataaaattgtatagactatacttcttggcaaagttgacaaaatattgctggatttccggtcctctggcataatatccactccactccggattgggttcgaaggtgaaggcatatgaatgagccggaacatcacaacccactcctggatatctaatacattgattatttgaattaacacttgtttaatagagtttgtttaacggggggaaaagaggggaaaataaaacgtacttgttttcaaaccaggttcctcctacttcggtgtttctacaaaagcgtcaatagtagatacatcaagtctagcaaggcggttccttacttttcgtagacagtcagttcatagttggatagcatattctttgccttgtaagccatcatcaaaccagctgcaccagcgccaacgtggaccactttgagccgccgtggctccgagtggcttttttcgacatagttgttcgatgtagaacccatgatgaataattggctgatcaaaatttgcacacgctcgaccaaattatttatattaagccttttgggtcgatttctgactgtctgacacgaagcgtcatgcattctgacctgacatgcatctttagcgtctagccgaaattagctaactttccatgtggtcagatctcagcctccatcaaggaactcctgtttgcattgagatctccgatatgcaggtctccggatgaaaaccaatgaatgattgacatagggagaaggaaaaaagaagatgcagaaggtaagccaagctactgaaaatagttgctacacctaaagcggagtaaatggctcatttcctcaacagcttattgtcatctgtagatgagtatggaattaaaggggtcatgcctcgtaaagtgatggcacgattcagctgtcctgacaatttggcccccatcagtgtcaacctttgaaatataaataccatactgaatcatctcacattgaacaaacagaacatcatttgtaagattcaatctaagcactcaaaagttgaagcttggcgatcaacatgcatatgcaaggaaccatggctgcatctcccctgctcttcctgtttggggttctctccttcgtctatctagcagccgcttctaacatctcgtctctcgtgtctaccctttcttcctcctcccagatttactaccccagcgatgctgactgggctgacaccgtccagcgatggaccgcgtgggacgagcccaccttctctgtggccattaagcctgcctctgttgcggagctccagtctgttgtacgttttgcctctgtccttgttcttttccatatctgactatgaaataaaacaggtcaaatacgcttccaaatataatatcccttttttggccagtggtggaggccatggatatagtacctctttcggaggtcttcagaacggtttgaagattgacctaagcctgtttaacagcgtcagtatcgacaaatctgcaagcacaatgactatcggtggttctgttaagttctctcaagtcatgggacctctcttcgaggctggaaaggagattcgtaagtatctagtccatgatatggggtgcggattcttctctctaacactttactaatagaaaccggctcttgtccttgtgtgggaatggtaggtgctactctcggcggtggtgttggcagataccaaggccttcacggtctcatactcgatgctttgaagtcggtccagctcgtcaccgctgctggcgatcttatcaccgtctctgccacgcagaacaaagaactattctggggccttcgtggcgctggatttaactatggaattgttacctcggctacatataacgtccacgatctcacaaacgaaggcaatgtgctcaacgccgactttatgttccctgctagcctcaacgaaacttatttcaacatcttggctagttatggaactttgcccgccggtctgtccttgtataccttggtcatgaatagtccttccgtgggagtaagttctttcaactcatatgctatcagcagcctggctcattttatttagcccgttatcctgctgaacgccgtctatcccggagctgagcaagaaggactcgatcttcttgcccccttcctcaacctgacctctattcaacgcaacatcaccatgattaagtgggatgccgtcgatgacgacgccggtttcggtctagccacggctttctgtgtcaatggtgaaaagcacgatatgtggtccctcggtgtacgctccatcgacgcagcaacacacatcgattacttcagcaagctcgttcagttctgggaagactatccctctgcgtcaggaaccacctggcaggtggagtatttccccatccaagctgtcactgctgttgcggatgcctccactgcctatccccatcgcgagatcagtgcccatgagtaagccttctctgtttcattatgtatccgtgtgattttggacacccatttaacacttgattagaatgttttcctttaacattaccgactcctccctcggcgataagatagacgactttgcccttgctgccctggagtctttcaacgcgaccagtggctttgatggtgatatgcacatctacgtcagctatgcccacggcaccgagggattggatcccatgtatggcgcggagaagctgcctacgttgctgaaactgaagaagaagtgggatcccaagggtttgttcagctataacaatgggttgcccaactgatgaacgttgtccttgataattagagttcatgttgtattctatattctaggatagtttgccagttaatgaaagatgttattatacgttctactgaccaaatttcctctctctgatcacctgatctgtcactatgaagctattcagagatcatcttatctgcctacggagtacaaagcaatctaaattaattctatcactaccaatcatagtataacctcattctaaagcggcacttaagtagtatagagtagggcttaccgaatgaattaaatatgaccagtaattcattctatttgtggcgcaaatatataaagaagctcaagtcagaatgaaaattctaccattgtactatcgttatgacaaattacgatcgcatttaatcaatcaaatactctatattatgtagccatttaatggcttttttagaattaaagtatgtctgttattggtggtggtagaataaatttacattgattgacagatcaggtgatcaggtgatctctgaatagcttcatattcacggattattaggtaatctcaatataaaatctttgaccctccaggttacaatttaaagatagatggtattcaattgcaacaaaaatgtattgttaaatgtactccttgcaaaatccccgaaatatattctaactaaagctaatttctcatcaactcggctaggttcaagatgttcatggtaaatttgggcgtgattctcatttcctaggtgtgcttcgactcatttttattgctcaatttacgtggaggtgcgtataaatatatcgttcccattcagtatcaagtatcaagtatgataggcagtacatccaaatcatgcacttcttccttcgtattccttctccaactcacccaaaaatccctcaatcttctttccctgaaccaggacctccttacagtcaagcaagacatacaacatccgcccagcctgtgtctctccagcagtgatattcttccacttgtgcgccgtcgcccgctgcacactaatgtcaccctgcttcattatgcgtgtctcgccggagtccagggtcaactcaaattcaccatccatcacaatgccataatcgatggacatggcccgatgcatgggcgactccactccaggaccaaaatcgatcatacgtacgaccgtgccgttggtgatgtggagaccgggctttgttttcgtcaggtctgcgttcatatgaagatgtgttaggcttgattaaactaacctcgttctccttggcatatttgatgtctttgtcctcgttgaggtcgacggggttctcatgggtggagtagataatattggcaacggcctggttctcacccatgacacggtggtggtcgccattgtcggtgacgaggaagtggcctttaccgtcttcttctttgttgccggtaatgagacgttgggtcgcgcgcagacctggggctgggaagccgtcggtgatgaagttgatggcggcagtggtagtcatgatgaatgtttgtgtaatgggatgtttgatgtgttgggtggatttaaaaagtaaggagatagcaatcttatatatttagaaatatatttctttatgatacttggtacctgaatctgacattatctgacattatctgacaatgacatcggggaacgcttaagcatgacttgtcagagtagttcccccatcaacaatccagctactacccgtgacataactcgctttggggctacataggaacaagatcaaatcagttatctcgtccacgtgtgcaatccttcccattggcacggcctttgcaatcagcgccttcaattccgaattcccttgcacggcgcggtccaccataggcgtatcaacccacgaggggcacaggcagttgacacggatattgtattgcgcattatccaatgcttttcttttgttagaaattttctctttctgtccatttaaatcatgtcagacgtaccggcgtttcgagtcaaaccaagaacggcatgtttagacgtggtatactgcgtcaataaaggcgtcgccacgaacgatgaacaagacgccatattgagaataacaccccgcgtagaaccccgatcgggatttttcgagctcacgggcttcagctgttgctctttcatggcgcgagacataaccttggtgagaaggaaagtccctttgacgttcacgtcgaggaagcggttaaattccggcagggatgcttcggcaatctccgctgcgacttggacaccaatctacatagaggcatcagaaaatcaagtagcaagaagatggagagaaagctcatactccagccgaattcaccatgtaatcaattcttccaaacgcctgcttcgtctctgctaccacggattccacctgctcctcattggtcacgtcgagggtcaatacgagtgctcgatatgcagggtgtgttgccaatttcttgctttcttcggctgccttctcagcgctctctcggttcaaatcggcaaagacaacgccagcagctccttcagaagcaaaggccaacgcgcaggcccggccaatcccgctccctgaaccagtaacgagagcaaatccgttgatgctcattgtgcttgtggaaataatgacaatagtgatattttagatgcggttatgctaaagttaaatatttccgttggaattggtggtatcagatgtttcaagtcagcctcaagccacctgcagtcagggtcagacggtaatatttctaattagttaactttcggaaaaaccgggaaattctatgtataatgcgtgtagttgatagagggagaaccatctactcggaacaagttggcttttggggtcgctcatgtccggaatagattatgatgtactttggttcaccctctacctccctttctttcccttccatttccaaatcaaccgatgaactatgccgtgtactttgctcccaagatgtaggcaactcatattcgatccgcacatttggctgtttagccaactcagccagtgccggattatgttgaatcaacatctccactagttcctgctggcttggccgaggcgcttcccgcacggccacgtggcagccacaattgctgcattctaccacatcttcttgggaagactgataaggactatcctcggttgtagtggttgtggtgcatttcttccatggacgaaataattgcttccgtgtcgtgccattgcttctagaagctcccatttcaaagccgcgggatagcattcgggtactccatttgactgggcagcctctggacgacatagattcgttagatgtatccaaggaagaagacaccgcgtagctggatcggggagtgtgtggcctggaattatcgatgtggattaaaacatttccatttttgaattccctgggatgcaaagacggaggagagaccaatgtgtccatatggagaatttccggatccaaggcgatctgatcatcatcagttgtaagatcaaatggtagagagtcgaagtcaaagtcgaagtcaaagtcgccgagttctgcatctgtcgtctgcgatggtgtagtaagtgacatctcgtccgggctccacggaatggtgccttcgaaaggcgagggagtattcacgtcgaaatttgccatgtcgaagtttgcctgccattcgaggtcgatgggaggatacaaagcgtccatgggatccggaaatgtttctccaattgagtttccagcggtatttgccgcagacaaatgagggctaccatctatggaaggcgttaaagccaggatgttgaaggggattggctggttttgcagcttcctcttcgcccctgtaattgagttagtggatggatacagtctggcccaggaaagagaaaaacatacgaagcttgcgttgtgagatacgattttggatgcgtttgcgcaaagctggctccgatatttgactccagtcctctttatcgatcattttatcaatttcatcagttgaagccattttagccattgttgagtgatagatgattgaaggtaatcaagatagtaatcaacgcgtgcgagaagtggatagaaataagacaatttttgaatagcattcccatttatacttcgtactggataagcattcttcagatagattatcgtgatcttgcaggagtataacctctgctgccgttccaacctacaacatgcctcgtgttttctacgagctaaacctcgacgggagcggatgtatgcagtcagcattgaaaaaagatgtcagcaatgatcaaaggtaccctgcaggagagacggtattattactgcattttttaatcattttaacaatagttacggttgttatgctactgtaatactctatttttatatagtattctagagtaagataccataaaatacccgcacccatagtggacaaatcatacaaaattaagtgtattgttacaatacaacggtaacatattcggtaaccgagctggacacgcaagaccctaaagcaccatagtaaatgtgataaatcacaacttgataactatctgtagtctataggaacttttacttctaggttgacgctattcaggtaatttataccatctttattggtttagacatatatccccagcttttggcaacggaattatcggtaatctttgaaatgaccataatacggcgtcctactttcttggtaactgacatatagtactaataagccttatcaatatctatcggcaaatagagaaataaattaaatatttggtttggttgttgggatactgaaacgctgaggtctctggacgatcgccgtcatgcatgaggcggcggacgaggctccacaacctcaccactcagcgagaggctatctggccggccccaaccaacgggaccctaccagagaatttactggtcgactacggagtactccgtacgatgtggtcaagctggagaaaccgggccggtggcaaatcggagttgagaattcacatcagccccgcggggtgccgtacgacatcccacccaacggaccgtcgggttggtccgatccgccatcaagagtcgggtacgggttgcctcggacgaaactaatccgtggaggagatggagtctcagcaaacgaagtgaatcgaggcgccctgtggcctctttcgctccgtttggatgttgacagccggagaaggcagatatagatagtagctagtcctaaccttctctcttcatcaataaaattccgaattgacatcccacctactcccatccaactaatttcagtagctcggcaaccgtcagtcacaagtgtagaatatatcgcatttactatgatgtttaaggtgtccagctcgcttacgtgtatccatgctattggaatgcttttgttacgaataaaggccgagatgcttcttttgttattttatctgtactattagccgacatacggagtaacacgaggacagatccactagcaaaaattccccgatatccatctttccgcccccatacctttccaggtatatggtcgggatggtgagacgactaccccgtggcttttcgcttaatgtaacggttcaatttctaagcaagtcaaagcagatcgggatttccgataatcaagatgtatttttagtttatggaaaacggtccagccgggtcttgtggagagccatttctatgacttctgataaaatgaggggttggtactattaattcactcgaggaagcgcactagtagatcttgattcttcacgggttgtatatgatcaaataatcatttccatggagtgcttcgcatgaatcatgatttctcgcttccagttcatagtacccatgaatcaaacgtaccatgcgtacacggcacgtggcactatgcacccgcttcatccgaatccggtctagttatcatgtaagagaggctgagattggctatattcgtgatgataatgatagaaatgagcgcgaaaatggggcgagaacaatgcaaaaatgggttgaaacaagaattgaatatctattttggccaagtgctacaaaattggaagttgtatgagtgaattagcgttagttatttgtttgggggattttcgtagcgattgataattcaaccaaccgcttgtagatacttacaatttgtatgtaaatctctagcaaaattaagtcacttttatcatatcaactgctttatcatcagggggttagatcatgtaggaatcaggtagaatatcagattcttttgggatcaaaatgcatgtctttttactctgtaaaactagaagtgggcagaatatatggcagaaattatggcagaaattatggtggtacttaattaggaaggaggtactggaagttcaggcagaggggggggggtggatcttatccaagggggaaggtagcattatcaatccctttgttaatatagtaaaacgtcacatcatcactcaaaacgtcaaatcatataaaatcagtatgaaaaatactcctcccgcatggtagaaaacaccttccagatctgtgtcgagcaattcccccttaatcgtcgggcgatttcatctaccaatctgatgacgcgaccttccagaaaccattctcccctcagtggctgtagaaggatagcatagtatgacaatagcagtaaagcacccgggttgttctgtttcaatagggccaggtagtcaggcgaaacgcgcattggccatgaattaagagcatcccagatactcggcgaaggtccgcaagtcttgataaacgcaaaagcgactgccaatttgacagccgaatcgcggtatatagagcattcagcggagtcggattcacggtccggtatgacggagagtagagtaattagaagtaggtcgttggggtcggcagtgacgccgagatcctctcgccaaagggttgtaaaaggtgccaaggggccagtactgagttctgtccagacgggacagagcatggagcagccgttacgcagtatctcgatccagtttgatgacggcgcgtcttctgggttatcatcattgctaagaaacaatggttcgtcgttggattgggagcctagggtatagacgacgaggaagaatgcaaaagccaacacggcctggctattattactatccacgtgcatagttgcccatcggaatgcaggggctgcctgattttggtgtcggattgactggatcgtgtaatatactcgattgggtggatcgataaaagcaaggtggagggcggaacaggataggattccatgaagtaggaaggggaattgcgtgcctagctggggaacaatgattcgaaatgcatcatctgtctccgggccacatgtgaggattttgtaggtatggttctggtaatgatcgagtaatcctacgtcggttgtgatcaacggttgtaagggacatgattctccatgattcgatcttgaagctggagttgtcacagcctaaaggaataaatcagttggattgatagtggctggtggtcattatcttgacttacggtactcggtagcccatcggaactggcagatgatgacgacgagatcaacaacgctgggttggtaaagtagcggaaggcatttcctcgaaaaaagctctgtaatggcactgggtcccagaagcctccgttatcagaggctgcgatatggtgaacagtcatccagtgctgcttcatgcgcttggttgtaacacaaagatgagcacagcgagcaaaggaacaggctagcccattttgtatgggcagtaaaggcactgggaactgggtttcatcgggcaagacgacatcattaggttgggtcagttcaaatctagaggcgtattcgatgaatgctcgacgcgatgaatgatgaagatggtggatttccttaagatggcgagcgacagcaccaggctggatagcgtagctgcaacgccggcagatcaatactcgatatgtaggcagataatgtaatagctcgggtggagtgagcccatccactgattttaaagtcatggtgatgattgcctatgaagagaaacaatccgcaaagatattcttcgagtcatttcagggggccaaaatcataacgagttagcttctcgcgctgttccaaatgccaatgaatcacgatacgttgatctaggcgggattgggaatgttagtcatcatctgatcaggtggatccgtttacggcagcaagtgaatgcgacagctttctcatttagaagtataggagactacctaggtaagcacaaaagacaagaagaattgaccaaggacagcacattacgcatgattacacaaaagaatcaaaaaaagaacccaaacgtcttcacaagaatttaaatctgcgacaacaccttgtcaatgtcaaccacaggggccaactcggagattgtctccttccacacctgtgcctggatgattctgccagaatcactgtctccatatcctgcaaatggagcctgcttgttgtcactcaggtacttgccattagaggcatcgccagccaacaccgatgagtgaaccagggtacgagcgcccatggagacagagcgaccgataactctcttcatacctgcgagaactttcccaaaggcaccctcagccgtgcggtgcaactcagagccataacagaaaccagggttgaccaagttcagaatggcgcccgtggagcgcttggcgctggatcggttgcggaacagctcaaggaagaagagctggtagagcaacttggaggtatagtaacgatctcccatgtcgaaattggccttgtcatccaagacttggataaggggaagtccctgcttgatagatacctgagcctcggggaacttagcccaggcggctgtctcactgccgacgatggaaatcaccgggcgagcgcggttgaggttgttggcagcctgttgatcaagcacgggtaataatagcagcgtcaggagagccgtgcttagccaattgatttggatgcttgactcgtgagaggtgggttggttgatggtgaagttgaagttggcaacaccggcgttgagaagagcaaagtcgacctgaatgtcggacttcttgaggcgctcgacaaaggcgatagtactggcatagctgcctaagtccagctcccagacctcgaccacggggggcttgaccgaggcgggaagcgaggcgagaagggagtttcgggcagcttctcctttggagatgctacggacggccaaaatcaaatgggagagtccaaggccgagaaactgggcggaagcttgatagcccaggccagtattagagcctgtcacgatacctgccttaccgcgaagggaggtggtggatggggctttggaagggcagaccaagaactggcgatagaggaagcctgggtaagagttatagaaaggcattttgctgagaggttggaaggggaggaatatgatgagaattgaaattgaaaggcgtcgcaatgcagggtataaatactttcgtccttcattttctatgttgtgcttgcaacgttgtcctagatgcgtacatggatagatgtgggggcgaatcgacggtgccgttccacgctgtgattggtcaggaataatttacacagaacgggaggtgccgttcccaacttcgccatcagagcttgaaccccggagaagcatctgactactagtagtcagactgtcatgctgtcggaattaaggtactgacgggtttaatgggcttaatgggtttaaggtagatgagtctgactccccttctgacttttttggtggtttcaagtaaccgctcttacccactgattccgtgagagatttttgatttgcgagctttcgaaatggcagggatgtctccggtccatatacccatttgagcagaaatctaatcccgttgtccggccgggtacgcagacatacctctcagggttcagagcccctttgaggactgatgcgttcatgccctattttggaacggcaggaaaattgaatcatattgtatgttgtagttagttaccattacatatgctttaataatcaaagtatgcaatcagtaactaaagagaagtctgacctagcagacaagacaggtaatgagacaagacaagagtgacacagcaacaccaccatccaaggaggtcagctagtaagcgtagtcatacagaccatagcaatcatccttctatcctaatagaacatagtcctgtaaactccttttcattcccttttcattctgtgtgtcgtgtgtaggtattcctcctgtgcgctgagttctaactatctgatgattccgggtttccccattcggtactccgtattgctggcagaactacccgtaggcggtatggcacaaagcatgaaggcggtgtaaacttgcaaacgccaaccacctccaaaaacagagatgcaagaatttgtatggtgccaaaagcttcatttaatacatggataacttgcattacactgtataaagcggtgtcaagagtggtgctaattagggcattcaagcatcaaaacacttcctaaaaggggctatacgtctgcgtagaccgggatttgtaaacatactagacatgccacatttgtgatagtcatatattggcaccatgtgtgcatgatatcctggaagcaggaatccatccacgcactatcgcataaatcggacattcccatcacatttaatagtaagtcatacctctctcgggtttaatggcaatacacgagccacgaaccaagaaacttctatatatatccaaattatgtctatcgcattcctctattgtatcatattttgtcatctcggcattgactagagcagtcacactcgctgcaatggcatattttagcttctacatgcttatcttggtagttaaccctaataggagatgatatgcattgatctcacattcaacaagatatatgtacataactccactaccaggctgtcataccaccatcgacccgaatatctgcagcggttatataggagctctcatccgaagcaagaaagctagccacagccgcgatctcctctggctgcccgatacggccaatcatgatcttctgcgttaaatccgatctccattgcgggtcctcaagcaaaggtgcagtttgcagagtctggataaggcctggtgagattgaattggcccggataccatgctcacgcccttccatggcgaactgacgtgtcatggcaataacaccacctttcgtagctgtgtgggcgatagccggcactccacgaattgcaatccagccgttggcagagccaacgttgatgatagatgcacctgactccttcagatatggccatgcaacacgagtcaacaggtagacaaggcttaactcctggtcaattgttttgtaccagtcgtcatccttgccgtcatcgagccagctcatgtagaccattgctgcattattgtacagcacatcgatgcgtccatatgtttttatggctaggttgacaaattgctcgcagttctcacgttttgtgagatcgcatggggacatggatatcatttcaccacctagctctcgtacagctttgatggttgctgcgtcggtcacagtgttgatgtcacagccgacgattttggcgccttcttcggcaaacttgagggctgctgcacgtcccatactaccgcctgtaccggtgataagacatatcttgttcaacagacgcggtgccatgacgattgctttgggattaatatatgtcaagaaaaaaggatttggacggtggcatgagagtctttctgagaagagaagaatgtcacagagggcagggtcaagggggggccggttagcaagactaaaagaactggctggttagtaaatatctatttgaatgtttgctttttcggggaacccaatcaagaagacttttgaatcttttctttgtttgttttcccacatcaaataatgactccaccggctatcgaaccggaaactcagtagctgcatattgtggctgcgatacatgatcgatggagccgattgcgtccacgatggacgatcggtccgaattcgatagtgtcgatttggaattgtctgccagcgccttgtaaccgaggcttctcctagtaagttagctcttagtggaccaatagcgtacaaaagaaatagtatatacccctggatgcccatgaatatcaacgtcgcctacttcctaaatcagaacactaagctggtttggggttcttgatgcggatgattgcaggtcggaaacttcgagcattctttgggcttttcaagattagccaatatttctacgctctgggtgggcacgagaaagcgctagagccagaccatgtatcaaccctaggcgctgttcataatatcggggtcttatatagtaagcaagacaagctaggtgaggccgataggtgaggccgaatagatgcttctgcggctctaactggacgtgagaaagcactaggaccagaccacacatcaactctagacacatttaacgctcttggagatctatatcatgactaggggagactggatcaagccgagcagatagatcccgcaagaaaaaagaatagccctgcacctgccttttttctctggtcatctctcactatcatagaaaaaagaggggttgtgcaatgcgagccagagaaactgctacgaagatttaattgatgcttaacttcaattgatttactcccatatcgtttcgtcccatagcagcaaaaaaaagtgttaaagccattttattaagatacccttttgaaagagcgcatcttttgggcaaaaacaactgcgtgaccataaatatttgctaacaattaaaacggggaaattatcaatttaatttgataaaaaaaaaacaatgggacgagccgggatcgaaccagcgaccttgcgaacttcagtcgcacgctctcccaactgagctatcgtcccatttgggatagagataaaagcttaattaatattataaatcaaaaatcttttgccggtgtgggctacatacaaaacgacatagaaacccaccatagcccacggtttaaaaatcataagaattagatagtattacaaatgatgtctaaaaatctactcatcttatatatttacatcgttctcaggcttcttttgtcttgcctcgcctcggttggtgctgattcggatctcgtacacgtcaacagtacaacaaatcgatactatccgaattatccggttgactaatatgaaggatatatattgtaataactagttaaataaatcgggtcccatatatggctccatagagcaggccaccgaatcaaggatccatatcaaactccggattgacccacgaaggctgtggtgcttttgcacgcatccaagccccaaacatatgcagaccaccaaagaccaaaaacccgccaccaagtacaataagtccttgggcagtgaatgtccaagtccaaccggaagacgcttgccaattggcaatgaagaactaccaagaagtcagttatcaatatctaaatagctcattatcaaggtggattggacaacataccggattgataaaagcactcaggttcagaaatacggcgtagaaagtgatcacgctcgttgtttgtagtgggtagcagtccacaatgtagctgctggttacagtatttccgatctggataccagcggcaactagaggattgtcagcactgcgtcgaatgctttatgatataatccggaagatagaactcacataggaagaatgccacctggcctaccatccagtggtagtttttgtcgatactgattccccaaacaaccaacccaactataataattattattatcagtagagttcaacatatagtctggaaagtcaaacacaccagtggtgatcaatatagccgggtacgccagccacaaccgcatctccggaacgcggatattgccattcctcttcgccaacttctcgacaataaagtcacttaatcgcccagagcacccaatctccgagaggacagtcccaagaaatagcccaaggaacagcagtccctggatcagaggtgtgtagttcggatacgctgccggtaccatcgtgataacagataaaacccaccagtaccagacgaagctgaatccgacaactgcgataaccactgtggataattggaacgtcaatacaaaccgagtgatggagtcccacggcttgggatggcgcattccgggaataggacgccaattgatgaaagggaggttctttgtgcggcgtagctcggagggtagggtctccggagacatggatgtcgccgtgtcgtctcctgctatttgcttttcaacatcactcgggagagctttgttgccgtcaagacggggcatttgctgaagcatcttgttgcgggggtagagggtctccggcatgaagaagagttcgagaagtagtagtgttgcaaagaggattgcgttgaaccagtttatccatggggcactgacgaggtccaaaaagccgccaactggtgataaatcttagcttttgacgcatggtggtttgaactgtccgaacaacttacaggtaggacctagaagcagaccagcatcaattgctagaacccacaagccaagcttctgaccacgctcataatcatagaacagatcggtcactttgtcaaactagatgtcagatacaaatcttgtctgaaggtgatgattgagacataccgactgccattccgactgtagatgctgggctcactccaaatccttggaagaagcgagcagccatgtagcccgaatagctatcagctccagcagccccaatggtcgaggccagtgatatggttgtcccgactaagaacaccacccttcggccaaagatctcaccaagggatgaccatatgagtggtccgacggataatcctaatgctggcacggcgactgtccagttgacttgcgaatagttgatcgagtattgatcttgaatctctggaaatgagggaactgtggtggttgtgaggtatgtgaataggaaatatctaacaagggttagcaagatgtcagcaagacgtgtagattgttttctggcaatgtcgagcaattcccggagctgatttggtacatacttgaacataacgatagatagtatgccatttttctggaggcttgaccaatttaatggatctagggggtctgatgttggctgggggtgaagtctgattccgttcttgtcgacggctgcattgtgaaggacttgagtgccctccatgggagtattggttgggtcgacatcgtcgttttggttgtctttttctccaaactcgcgtttgtcatcgatttctgttgggcaagatgccatcttgtagactcttgcgtttgaatacgtatccaagagtatataggccggcagatgactatgatattagagcccgccttgatctgggagatgatatatataagacatatatactagatctgtcgattatctgttgccatgtgctgaaccaagctttggctgtctattggtcgtgctgccggggggcccggggtagaatctcggaatctcctgatgaaagggcctagctgataagcaccgcattagggtttctataattccacgaagcacgtttcagcctattacatctaatgagcctcggattgtgaaagccatggcactgcatactattataaccattgttttgattataaaagtcgtccttaggggaagtcatatcatctcattcattaggtatacaactaaacagtcaagttacagtcaaattgtggccattcccttcttgctcctttctgtgtacacaaaccattagaatggttatttcataactatcaggattatcattgctgcaaaaagcccgccactatcaaagtgacaggagtgctgaggacgttgtctgcatgcaccaatcaaactggccagagacgatgataagaggcgaaagataaggcgctctagtcaacttccacttcgaggcaacaattagagaacatcagtggacttccccgtgttagagatcaagactagattgatctattcgatctcattctccaatcttgaagccacagaagtgttggctctaacatgttcgcgtgttgtataccgaataccctgccgcgtcgaaccgtccggtatcggacttggacttgagatactcgaccaacagaaaaatacacatgtcatggcgattattgctttgattatctcaatcatactggctatgtattatgtatccattgttgaatacacatgtagcgaattttcgtattactgactggtaccagatattcgtgcatatacaaactccacgctggccgtggcataatcttgaaataaattcacactttccgaatcgaaagcagtttgctaacaggaagtattttcgcttcttccaactcccttgcttaacaagtggaagaactcacaccgtactgtgcccccacttcctaaaaaccatcacatattgaagccggagccaaatttactacgaagcacatatcgccaattccatcatgcccaacccctccagcaatggaggctcaagtcaccaaccaaccgagtatacttccctcctcgccaagcccatcgacaatggaccaccattgcacgactccgaagatgaaagtccattctcgcgagccctcatcctcgccgagttctggctcttgctgaaagactcaactcccgtaatcttagcctacactctgcaaaacagccttcaaacaatatcggtgttgatcatcggtcgctcatcaccggagaacctcgccgcgagtgcattctcgcagatgttcgccatggttacgggatggatgattgctttaggaggtaccacggctatggacacactcgcctcctcctccttcacgggaagctccaacaaacatgacttgggaattctgcttcagcggggcttcttggtcctgggtcttttttatatacccgtcgctatcttgtgggcttgttcagagcctgtctttttgttccttgggcagagtcctcaactctcacacgacagcgcgaggttcttaacttgtttgattcctgggggtttgggatatatttatttcgaggctatgaagaagtatctgcaagctcaaggtatgtttgcacgagattgatccgggtatggatactaacatgaccatcatataggaatcatgcgagctggaacatacgtgctgctaattacctcaccattaaacgccggtctcaactacctattctgctacacattcaagatcggcctcttaggcgcacctctcgcaacgggaatctgctactggctctcatttgcattgctagttctctacgcacgcttcatcaacggcgcagagtgttggggcggatggtcgcgcgaggcattccaaaaccttcgcacctttgcacgactcgctcttctaggcattgtgcacgttggaacagaatggtgggcatttgagatcgtcgctttagcagctggccacctgggtactgtctcgctcgctgctcagagtgtcattatgacagccgatcaagttctcaatacgattcctttcggaattggagtcgcgacgtccggccgcgttggtaatctactaggaaaacgagatgataccggtgcggcgcgcgcggcgcatacctctgccgtgctgagtatggtttgtggtggcgttgtgctagctgttcttatcgggacgcgggatcactttgccaagatcttcaatgatgattcggatgttgtacgtcttacggctgaagtcatgccgtatgtggcgcttttccagattgccgatgggcttaatgggagttgtggggggagtctgagaggaatgggacggcagcatgtgggtgctctggttaatttggtgagttattactgcggtgcattgccgttaggtatctggcttgcgtttcatggctggggacttaagggtctgtgggttgggcagtgtattgctttgtatttggttggagtgtttgagtgggttattgttgcgcgcagtcggtgggatgtggaggtgcagaaggctttccagcgcatggatgtacatgagactctggaggatgcgatttgaaggatagtagatatttgattggctaaagaattagctatacatagagtttgtcatctcaattagatagaaattgaattgttcttggcgtttacaagtccgctagatgcgaagtattacaacacatcacagatgcgtctaacggttgtactgtgaacagcatcgcattcaataatacattacaatatactatactatactatacaacatccctattaatatcctccgttgtcggacaagcacactaccagatgctggatttagcagatcgccagccaccaatgacgaccggccgataagccatcgcatatattaataaccctaaatacatccccagtcagttatcttccccactaatatttatctcacgttcccactcccaaggacttcccttttgggacgggatagctttgccttgcatgatgtgcccttaaccgcatcccccaccaaccgaggctccacctgacgtcggttccttaaagggaagttacggggagcggggaggataaacgctgcctgccagtggcaaaggactttctctttgtcttgttttcccgaggttgactacaatcttgagctcatgagtgcagatagtacgattgccgagttcctgtcaatcgtgtctgtattagggcaataacggtagtggattactatcgcgtggcaagctggaatgtagagaataaatatcttagaatggatgactacatatatcatggaaggccctgcattttagcactatatccaaacgacttgtattcactttgacactttcaagttcttctctacataaatttgagtcttgatatcacaatgattgcctccatcgcgggcttggttgtcctctctgctctggtcacagctcatggtaaccatgaccagtctcaatcccagcttgctggtccacacgaaggactctggtacaacacactcccaggagatggcggcaagcaggtgagcagcccctttgataagctactcaactcaaacgaagccattcactaaacgaacaaggccgactctgtattctccggaatcacaactttcggccgcctgccctatttcccatgcctggccagtgatgccgagaaatacgacatcgccttcctaggttagtcattaccagccgatcgagaccatctcatacaatgcccctactcacatatctaccgaacaggtgctcccttcgataccggaacctcctacagacccggtgcccggttcggacctagcggtatcagacaaggctctcgccgcctcaatctctagtatgtaccagcccgggagacagagatggttatgcatggcacgaacaaggctgacgaaattatccttttagcggtggctacaatgtgcctttggaggcgaacccgttcactagcgatatgcgaattttggattgtggcgatgttcccgttacttcgtatgtttgcgttcgacgggagatacaaagacaggaaactaatccgacatagatacgacaacgcctgggcaatcaagcagatcgaagagggacacaacagcatcctgatgcgcaagccttaccttgacgctgataaacccggtctttcgcgtgctggcaagacccttcctcgtgttattacccttggtggtgatcacaccatcacactgcccttgctgcggagtatcaacaaggcctatgggcctgtcactgtgattcactttgacagtcatttgtgagtactcttagcattacagcatggacgattgactaatttgattagggactcgtggaagccgaaggtcttcggtggctctcctactcaggttgcgggtatcaatcacggcacttacttctaccatgcggcgatggaaggattgttgaagaatgataccaatatccatgctggtattcgcacgaccctatctggtccttccgattacgagaacgatggatactgcggctttgagattgttgaggcgagagagatcgatgttatcggtatgttatcttgtcgcttccaaggttggctctgtactaataagtgtcaactttaggaacggacggtattatcaagaagattcgcgaccgtgtcggaactgaaaaccccgtttatctttctatcgatatcgatactttggatcctgcttgtaagtcttgtcggagatgtctattgtgggttgtcggtcgctaataatacaatccagtcgcacccgctaccggcacaccagagactggcggttggtccacacgcgagctgcggacgatcatccgtggtcttgacggcttgaacttcattggtgcggatatcgttgaggttgcgccggcttatgataccaatgcggagttgtcgacaatgtaggttgctttgagtggtggaagatataacaaatactgacttttctacagggctgccgctgatgtgctttatgaagtccttactatcatggtcaagaagggcccgttgactattggggagtcgtctcatgagctctgagggtttgtggagctggtgggtatgtcattgtggtgtttgggagcacggacttcaggctttggtgtaacgagtattggttgaggagagaaagagaacatcggaaaggagttttgcatgtcaaagaccaaattgaaagtgagacatgatgatatggtggccgaggcatgttcttgtccacgatggcagttactatatacaatgtaattagattgcattgaaatgaaataaaatgaaccaatgattttacggtaccccatctggacacgcccgagaagtataaatcttattgcgatgttgtatattcaatcaagtcaaagggatccttcggtatagcgccttgcaactcccgatgcggtaagagtccggcccaactccatgccattttattaagatacccttttgaaagagcgcatcttttgggcaaaaacaactgcgtgaccataaatatttgctaacaattaaaacggggaaattatcaatttaatttgataaaaaaaaaacaatgggacgagccgggatcgaaccagcgaccttgcgaacttcagtcgcacgctctcccaactgagctatcgtcccattcgggatagaagaagatcaccaggttgataccatgattaaataatacaggatggtcgctttcctagggttctaaacggcatctacgaatgcaatggataaccatctcgcagtacacgagtgcctattataggtgcatcctaatatctttgaatactaccggaagatattaacgtagtaactcaatctactaagcgatgcaatgtatgtattaaggcctgagaaccatagaaagacgtaggaaagaaactgttatatatatgcagttggtgctttcaacaccagcaatattcctacacgagctcatgcagaaataaacccagactgtccgccaaaataggtagatacagtatagttatgccatagcggggtatcacataagctcatcatcgtcacccatatcgatcaactgcgtatgtaccagcgtttctccgatcacaaccaaatatatattgtaaccattgcggcgagtgccaggccatataaccttttaatgaacctcggaatgaaactacaaataagtggacatgattacaaaaatatgaccatggacctcgtatgacttcaatgtatatattcaaccctgcgtttgaattggaaatatattttgaaccgtggatagaaggcaattagtttcgtgattattcaaataataactagtcatatagcagaaccgagaggcacaaatatgcatatgcctattatgaaacgaatgcacacacgcttttagagggctgaatacgacttgaagaggtatcctgcaagtctgaaaagccgtacagatgatattcgtagtagtaaagtatgatacaaggtcttagatactcaggaggacttaggagaatcagataagaagtcatagttggttgcctttagtttcactagttcttggctctaccataatcttcatcaattggaattcaaatactgaagatgacatcatcccagatgagtcatacgaggtccatggtcatatttttgtaatcatgtccacttatttgtagtttcattccgaggttcattaaaaggttatatggcctggcactcgccgcaatggttacaatatatatttggttgtgatcggagaaacgctggtacatacgcagttgatcgatatgggtgacgatgatgagcttatgtgataccccgctatggcataactatactgtatctacctattttggcggacagtctgggtttatttctgcatgagctcgtgtaggaatattgctggtgttgaaagcaccaactgcatatatataacagtttctttcctacgtctttctatggttctcaggccttaatacatacattgcatcgcttagtagattgagttactacgttaatatcttccggtagtattcaaagatattaggatgcacctataataggcactcgtgtactgcgagatggttatccattgcattcgtagatgccgtttagaaccctaggaaagcgaccatcctgtattatttaatcatggtatcaacctggtgatcttcttctatcccgaatgggacgatagctcagttgggagagcgtgcgactgaagttcgcaaggtcgctggttcgatcccggctcgtcccattagtttttgcttgattttttagatcaatcgacgtgtgatgtccgatctataagcctcgatttgacgagagaagatccctatgcacgcgggtggctagttagaaagagcacaagcaacggaggtagtatcaggaagcactttgagttcggcaacaagtttctatagaagtgagaaccgtaagtcgacgtcttggccttatttattgatagcttgctgtagacgttggattaaatggcgcacaagatagttttggcgaagtacctcgacagaattgggcaagcagctgggtgtgcagacgatgaatgtgcggacctggcttgggtcaatgatgtagtcattgactggagtagaatgttagaagctgacatcggatacggagtatatatagggacttaggattaatggaagacggggtcgttgtcgggatcggaacgaggtgtgagcccagcgtcaagacctaatcccctaaaataactatggaaagagaaagtagaccgcaaatcccgaacataaacaataaacatagcagtaaaattgactacatgactatgaccaaaccgaaaagccacagcgggtatagaaaacactttcattgatcacattgcctcagaagacagggatatcacggccacccctccataggcagcggtacaccgtcccattcgttgccctgcgtcgcaggaacactgacctcctcctcgcaagtcccattaagtatctcatcagcagcaccaccccagcccatagactcaagttctcgaacaaagaaatcacgctcttcctccatcatagacgcaccctcttcaccgcccatgacatccttgtactggcgcagatgccaccagtgcgtaagaccacgaagtgcctgttccaacggcaaagcctcatcaacctcagcatcgacatcagagccagcgagccagtcgtcgcgcagctccgggcggcagtacaggtagatagcggtaatgacgcgcatgttaccctggcgccatttgcggccgcagtaggggacctgggatttgaagagtttgagggtgtagaagcggagatacgggtctggaatcttgaggcccttgcggagaatgttgcttgatttgtactgcactagtaagaggcagcggtgggctttgttgcgcgtgatcttttgcatgatgtgtaggtaattgatggcggagaagaagttgcggaaggagaatactttgattggttctttggggaggggcgcggttgggtagcctagttcgtcgacttcggggcgtgtcggtccgttgaaaatatccgctagggattcctcttcggagagacttgccatactgccgtttgccgttgggtcgcggtggcgggagattgggggtggcatggcttcgtcttcactttcggtgtcgccaccggagttttcatcggattccaaggggaagtccgtgttgttttgacagaactggaagaaactagtttttgtgttagtgagcgagctagcgaatgagattgagtaacctacgatagatcttcccggtcattcttatttgccaccgtttggtcgacgtcttggtgtgcgaacattttgagaatcaaggggatatagttggagtcgagtagcagctgtgtcatgtattcgaatttcaagatatcttgatgagttagcggcagatcagtaagacaaaaacacccagattttagactcacgagatcgcttaaaccacttaaggagaagtaacagagttccagacacggctttaccagtgatctcgcgaagtcgaatgttgtctagctcatcgatggatgcatcggaaaggagattgtgagagccgttcatggaatgaccgttactaaaacttatgttagaacgaattccttgttattggaagtgtctgagctcacctcatgccctgcgtagtctggctagtagcctgactgaccactgcgctgacatttgtcaagatgattttcaataatacgatggtgatggactgaaggtgagatagagtatgggtctggtaaacagtaagcgaatgtcgagattaggtctcgaaaccgtacactcacataaaacgagtcaaccgcatccaggcgccgctggatatcaggatcatctgtctccttctctgctggcttcggtttaggctcggtcttctcctcgtcacccaaattctcctcgtcacctaacaaatctagatgttcgaagtcatctggcaaatcatccgaaatgttgtcagggaagtgagcagcgtcctcggaattccagccacggtcgtactgcataaagtgttcacgctcctgccaaagctgtcgcatcgcacgagtcattttcacatgggtcgagaaaagctttccggcttcaataattgacgcaggaacatcactgccttcccatttctttccaaccaaggcatcctggcgttgcgttgtgcccttcccgccaatgctgttgctagaatcatccagaggagggtacatgaaggggaaattctggttggtctgatagttctgtttcttcccagctttccctcctggtccagcgggagatggcggtggggacggcgccggggttgcaatatgaacggcctgttgaaggatagagccatttccaccggaaatcgagggggcaacaccacaaaagataccactggacgagttcatcttggctgcattgtgtggaagagggggtagaatagaattgttctctagttctagcggaacgacaagtggcggagggttgtaagctgggtatttggaagtgatttcctggcggaagagatgatagtccagaggggaggcgtataagaatggtgtcctgcgtttggcatcatccttctcagagaaaacatcaggctctagtacttcctttgcgcgctttaaatcttcgataccgccaaagacgagaagcagcgacttccacaacaacagcaggatcctggtcagcggaatattggcagattcgtcccagcgcagtcgagcgataatttcaacaatagagaccaatagattgggattggagctggtcagtgcatcgcggattgagctgcactgagggtcgcgcgcctgttgcctgcgacctacttctacggcgaagtataagcttgtgaggaccaagttggcctcacgctccggggccgcaatatcgccagggttaattcgctcgtaatcaatgtcactagtgtcagatccgagtgctgagcgggtcttatcaaaaaggcgacacatgtactgtaccaatgcagtaacgcccgagcattcctcgagaagggaaacattctgttcgatgcactgaatctgcattgactttagcagtggcgtttcggctgctgactcgggatttagatcagaaggatagtcgggtgccactctcccaccgctaataccccatacaccagtgaccacatagcaaatggtttcaagggcctccaatcgcgcggagacttcagaaagcttcagatcctcgagcatccgagtaataaacgaacgacgtaagtctttagaggcctcaagccaaggcaccccgggcgtgtctcgctggcgtcgctggcaaaaggtaggccatttcttgttaaaagtccctttcatgcccatcaacatgacacgatcaaaggcgttatactggaaccactcgtcgagctcatcggggaaagattgtgcatcggcatattcaaaagcataggctggttgctcgatcttgggcatttcacccacaagcttccgcaactccgataagctcagagagctcgcaccccggtccgtggtctcctgaacgggagctggagggggcggctgcatcggaggaggtggagcagagccttcacgacgaagttcaggtcgtttcataaatttttcgggcgcagagaactccgtctcaggagcgggtgcggcttgcgaggcctgttcctggcggagcccctcagcgacctcctccaagagttggtcgtctgaaactggcgagatatcggtcccagtttggtcgacctcatccgccttgacaatatgatgctcctgcatagtggattcgggtggatctgaaggcgcgtccatcattggggacttgttgagttgttgtgttcctggcagaaagttgttcggtggatcgatcaccagggtaccaacgctccatacatcagtgaaaagagcgaaaagaaggaacgaaaattagacgaaactcatgtaaatggaccactacacattttgtaaagtcttcgcaatgcacgaggggtgtggctgcggtgttgatgcgggaggccagctgacacgtgaccggactacaaagccattgtgtacgagatttacgaaatagatagaaagagtcagaatataattgatatcaggcagttaaaatcaacaggcaggtgtccgctcgctactatggtagtatacgctaaaaggggctatcccttactccgacttcttcccactgaggccgagacgcttcaacctctgagactcccaccgttgccagccagcctcagccaagtcttcacttaagacgagatcacggattctgactaaccgggacacagtgctttccatggcccattcgatcaacccactgcttcggagcaggctggtgaccatgaaccagccgcaggcgcatacaaatccagcggcacagccagcaaggacttgtctcggggtgtggtagttgaggtagacgcgactggcagcgacacctgcagctccgatgcaaaggcctagcatgaccaggactcgtaataggacggcaacattggggtatgagctggcggaagcttggctgtgacggaagagaaggaagaaggtgaggtagacggagaagaaggtcatgaattgggcgtgtgaagatggcattccatatcccttgccgaacatttctgcgaattacacgtgttagttttggaaggtacccagacgacatcgccgacttacccttcggtcgctcttccttgatgaaacgtttgaggacaaagttcaaggcttcacagcccatctgccctacaaacatcaggataacttccacctcccttgttgaccagatcaaggttgcataggaaacgcatagtgcctgaggaatcagggctagccatgctgaggcaaaggacagtcggtcctcagggttctagaaacatagtcagtggcaagtcaacagagatatgatgacataactaacgtagtggacatgagtcagagacaacgacgccagcggagtgtctcccataatgaatcaaaagagtgaatggagggaagttcgaaagttccagagacccctaaattcgggagatttccatttcagggatatcccgatgccaagcctttttcccttatcggcgataagcagattgggcagcggggacttccagggcttttcgacttggcgaattatttttccttcatatcttcaggcatccgaggggatttgccattctttttggggtttttggtttcttcatatcttcatctcttcactcgtctcccttctagtcacttcactttcaaacaatgacgccgttgttctctatccaaaccccagactctctattgcatcatcttttagacccctcccgactttcagccgaacattggcccatagaaggaatactcggcacctcttcgtctttggttggtctgaatttttaccaggatctcagtcacaacgctgatttgaagggaatcttcctgcaggatataaacctcccttttgtgcccgatcgtccttagtgacagttcacttgagatcggtcatcattaccttcagatttttttacgacagtcatgagccagcgttgctgagagtttttgcaggagacaccattgtctccaacttgcgatccactagcgttataccggaggcaaatatataatcatccccacctgagaaatcttcacaagtgatcatactcggtttcatcccgccatgaccgaactcgactttccagaggatgagcgctcagtcgagctttcctcgatagctgccatctttccagagattcaaatcgatccgtcctctccgttcaaagccgttctcgatcttccagtcgcaccttcctccccgacctcaatatgttttcagcaaccgcttgatcctgcagctgccgccatcacccctccaacctcattggacgagtctaagggagaattagaccagccgcctattaaagacatccatcttctctcgcacctacctccgcttaacctcgagattgaattgccagagggttatccaaccgaaaagccgcctatcgtccatctaaaaacgatcccctcgtggctacctccctccgtcatagatcaattatccaacgattgcaaccgactttgggaggaatgcggaaaggatctagtcgtctttacctatattgaccatctccagcagctggcagaaactgctttcaatatccagaatccgtcgggagaaatatatttatcgcgggacttgaagatcggactactagactacaacaaaaatgccgagcgggaaaagtttgagcaggggactttcgaatgtggggtatgccttgaaccgaagaagggcaccatttgccatcgattacttcgctgctcccacgtattctgcattcaatgcttgcaggatttctacaattgctgcatcaccgagggtgatgttgacagtgtgaaatgcatggcgccggattgcgaatacaacaagagacctgtagctgtaccgggcgacggccagaccccgccccgcaagaagcgtgatcgtactctgggaccaagcgagctactccagattcctttggaaactgaaatggttcagcgatatgcattcctcaagaggaagaagaagattgaagccgataaaaccacagtctattgtccacgacaatggtgccagggagctgcacgttccaagcggcaccccaagccagaagatcctatgtcggatgacttggatagttctgacgaagaagatggatccgaggcccgcggcgaagtgaacgatggagagcttcctcctatggcggagcgtgtgtctatctgcgaagactgcaactacgcattctgctgcgtctgtaagaagggctggcatggtgaactggtacgctgtttcccacgccgcgacggcgagcccacggaggaagaaaaagcgaccgaagagtacttgcgtctgtacactaccccttgtccgacttgcaatgtgccctgccaaaagcaaatgggatgcaatcacatgcgctgcttccagtgtgacacacacttctgctacctttgctcggcctggctgagtgcagacaacccatacaaacatttcaacgacgagaaaggccaatgttacaatcgtctttgggatttggaaggtggtgatggcatcaaccccgacggggctgaagcacttcaccgcatcccagacgcactcctagacttcgatgatgacccacctgtggtagacattcaggaagaaacagacgaaagtgatgacgaccaccctgcatttgaatttgatgatgatgaagacgaccttcaccgacatcctcctcctcccgcacccgctccgccccaaattaaccgcggtggcggcagacctggtcaacgtgaccacgcagctgcccgcgctgctgcggctgaacgtcaggctcaagctcgcgcaatggccgaggtacgaaaccgaaatgcgagacgacaagccagacgccctgttcgctgggcggaagttcctccccaccgtctccctccacaggcaggtgatcctagacgtcctgtacagtgggcagaggttccagcagaaccattggcagacgaagacggccccatacgctgggaggctattgcaatccgaccaggtagagcgcaggcacatcctggtcttcagcgatttttggatctagtacaaaatgaccgtgaagacgaatgggatagtgatgagatggacgatgacttctagatcgaggatctatgtgcatgactcaacattcaatggcacataagaatcttggtctttccctgttcaaaaagcgtcttaatgacattgatgcatacaacgacttgatgttccttttcatttttttcttcacattttccccttcattttgattgcgtttttcatcaattcccccttcgtcttctggcacaccccgttgcgtttccctctttgctttttttttggattttcttattctctgcttcattttcatatactagctcttctctggccaagcgcaggaaatgcccatacatactcctctatacatacaacgtgcgttgcttgcgcttcgtctatttgatattctgcgtttatatgatatctccataattctatggttgtcgatcgcttgactccgtctttctgtagcgcgcatgggtatacaattcctatgttaataaacccatgcataccacaacgcggatccttcattataatcctccatcttcaactccgtgacagtcaatcccaacttgcaataggtttcacaaatcttctcccatacagcctcacctatactcttcgtgtaatcggaaccatccgagtcaggatccatacatgtgctcatagagctcgtcataagcacgagatcaaagttcgcagtcataaccctccaatcattattaatctcattcgtgaagagacgttgggccggtccctcaatattaagcggcgtgttaagaggctcagctccacccagacaaatcgcaataaacccggaatgccactcataacacttcaattgaacaagcaattcaaacaacgtgcccatacgaagaccctcatcttgccgcgctgccttttgttggtaccaagaaagacccatttgcccaatccccttgcgaaaccgtccgaccgtgaagactggcggttgttgcgtcagcatacggcgccagctcgcttcaggccggagatatatctccatcttagccgggcttttcgcgagatcgaattcagcgagtttgatgtcctctattctggcgcctgcattgctgctattttgcaggtcttttgatggaaatgctgatttgaatgcttgtgccagcatggggttgtagactcgtgtatctgtcccgctgttttcgctggctgggatgaagaatagggctttttgcagtgagcgtgatgtgcggattggatctgcccaggtgtgacagacacgttgggcggcgattagggtgcgcatgtccatttggtggaggattgagatcacgatctcgggcatcgcgagagccctggtctgggctgggtgttgggtgtgcatctatagtctgtgatgcttttgtaaaattgaaacttgaattccagttgtataatgagctgcgctggtgggggctcggggtttttgttgattgcttgtccgagtcagctgggctgagacccttccaaggttggaagcgcttgactacattgtacgcaggggcataggagccagggttactttcggatttaataatgcattgcggccttagtgcctgtatttcgcctgatgttggccttaaacctgaccgctttcaggccctacctttattcaggaatctatatgtattattttctcttaagagatatccataattgattagatcgctattatctctgagttcaggttcaaacagcccaagaatcatgcggtgtatgaatttgcatggcagaaatagcctcatattcatggggccagatgcgcgggtctccgtaattgtaattcaggtaacgtatttcactaccgagctgcacaccaccgagctgcgcagcccaaaacgccatagtaaatgcaacatattccacatttatatcttaacgaccacttttcaacttgctttcattacttgtcaataggtatcaataagcatttttttagcaatatatctcaatttcaaataaatcggaaagttgcatcattgcggtattgaaggttgcaacactgaactataggaaatatctatatcacaatcactattatatagagtgatcagatatcatatagagaataatgggctacaagataaagtttacattgaccaccgttgttgcaatatcatgttgtaatttatcgcttttactatggtgaattgggctgcgcagctcggtggtgaaatacgttaactaaatccgaaagtaaccctggcccctatgcccctgcgtatacattgggatctcgccgtttagagtcatctgtaattaattaatttatggactttgataggcaaattgaagcaaatttatctagaaaaacatacattccaaggggccttccaagtcccaagcttccagtgagggtagggtgaatgactaaaattctgcctggcaataaattccaataggagagttatgaacctgtggcatacttagtcgcccgtattcgttcattatactacgtgtatatgtaggtacaagtagacctttctgattggatggaagtttgaatagcgattctcgaagtcgtgagtcaggacctgcaagatcacgaagttgtcagggtggattgattttctagcaaagcaccggggaatgcattgggttgggatcgacggctgcgctttggctacatagtatatggggatattatcttccaaggttccaaagttgatatcgaagtgggacccgtggtcttggaaaagaaaacttagttttaggtgactgaacataagatttaagcttattttgagcggaaccaattaggcttatttcggttagagcctcaagtgaccgctgtacgaattgattacatattttttcatactatttatcgactaccagtattgaatttgaggtggaatactgaattagatactccgacgggtagaacatgcctcttgtaatcaggtttcacgaagcgtaacctaatttgatcatcagatcaacctctccagtcgtgccaaaactcatagctcatgactgtgagatcagagaatagcaaaagcaacctgtaatgtcgagaaggatggtaaccatgccaggtctcatgaggttggtagatttccgaggcataggcgtgggtttcaggaattgtaaggttcgggtcttcggagctagggataatatccgggccagagggactgaaagcccaggattcgggcgggtttgcgacataaggttcatcttcatctgggttgagtagacggtggttgaatttcaactgatccttggggttgacatcctggggaatacaagggacatccggtggtatctcaaatccaggcatgggacttgcagcaatacccataagaggtagtggtggacatccatcgtccctctcctgggtgatgaaagggagaagccagtctaggcgaaaagtgtggccaatttcttcctgccatgtaagagtgatgatggcaactccaccggcctgggaggcggcaataacgatcccaagttcagggaggtacttgaccaagtttaagcgatcacaggagtagaacggagaatgctctaccagcgaatcaagtggagaccgagaaaccgtccgcaatacatggtctaatggataaggattcagagtgatggtatttccagaaaaatggagaatagggaaaaaccgagggttggtcgctgagtaacaggttagcattctaatctaacaccgaagcacgtcgctcacttacgatggtgtacagagcctgtcaaaacatccacttcagcagcaggtacttcagcagcaaaatccgggccccattgctcattttcttcttcaaccaaattgttaataccacgtctcacgcgaatcgagtgacggcgcgaagccacctgctggtcttgtgatacttcagagctgacatcagtagtgtcaacagtatcgggaggagaagctatttcggaggcttgtagagtggtattgttatgctctgagctcaatagttgcggtcggaattcagtatgaacacagccagaagggaaaatatcgtcttctagaaatatgctcgaaaccgttgcatgttcctcagcagcgattttctgagaagcgaggacggatctggcttcgacataatcagccgcctccgtcacgtcgaaaaccacctgatcatccatcatggttcgctttgggtcacatccacaggcatgaaacttgaggaggtgctgttgaaccctgcgaggatgtaaaggcaaaacgaaccaccccttttgctctcgaccactctctaaacaatcgtaactggagatatcgacaggacttaagctgtcccagactctccatatggagacgttgttgaggatatcggtacttatcatccacagaccgttggggtccaattcaaagttggcaaacgacacgcatggaatgttgtcaaaatgacccctataggtgagccgcaggttgcgtgtgcgatgacggggcatggaccttttcagaccctgcatcaactctgcattgtgtattgacacccatgtgtttccagagcctcccaaatttgaggtctcagaggaattgggactgctaccatcattttcagacaccacatccatcaaggcaaaagcaaagactgtgatatcacccgtgttcgcgctgacggcgatcaaccgagaaaacttgtgggtagctaagccccaagcactcaaataaacatgttcagcgaagaaaggctttatttcatgcgcatcaaatggtcggccgcctccatatttggcgctcctattgattgccgagaaaatagcctcaacattgtagccggtgacgtttccagaatctgtcgctaaaagcaaaacctcatcaacccccaaatcatcaacaatgatatgattgattgtatgaggcctagagcgatcgatgtatccagccgaatcgggttccttcatcaccgggtgaatgatcatctcaggttgggagccaaggagctggcgaggtccactgggaatccatacgtaaatgtcttcaacttgagctgtaaaaagcagatttcgacgctgcgagaaggccgccttgcaaaatcaaggtcagaactggggggggattatacgaaacagcaactagattagtaggtactcaccagattacacctccaagcagagacagttggcctaggcacatcactatagctcaatgataatcagtcacggtgattcaggtagtacaaacgtaaatacctactcaggaaactagcacaagtcagttcatagttctcacgtggggtaatttgaagacaaacatacgcgttcctcttctgcttcgatattcaatgcttgtacctggggccgatatcgtacgaattccctttccgttttagcacgcgtagagctggtgggaggaaaagacattgctgtaggcgaaggatgcttgcagagaagaatacttctttggatctgagcagcaagagtcgtgaatagtaagatatgcagcttgctctgtcattgccaattgtggagagaacaagccacaagagacagaaggctgggaactttgtaaacagatcatgattaagctggtcgcaaacacctccatggctgcggggaggtgcaatcattcgatgatggaatggctgaccgcccacgcacggaccaccattgagtgcgtacatacctagagcttcgagggcttaggctttctcctccgtataacacattctatcgcatgatggatttggttgctggtgtacgcaaagaaggcagccggtaagttcattcgctggtatcatccttttgtatgggttgaaggttgctaattttttgtctcagcggcggccgcaatgagttcaaatggtccgacgtccaaagttccgtccaccgcgagaactacttaggccactcggtgatggcaccagtcggcagatggcaacaaaaccgtgatcttggctggtacgccaagggtgatgaagaagaggaagaacgaatccgcaaagagcgagaggaacttcaacgtgtcaaggaagcggaagaagaagcaatggcgatcgctctgggcctcccggtgccccccaaagcatccgaaaacgccaacatggtccccttagggggcgctagtagtaccgatgtagtaccaagagaagaagcgatgccagatgtcggaacaacggaaaaggaccatcgctcgagtcaccgacacagacgtgagcgatcccgaagcccgcgacgtgaaaggcgacatgaccgggccgacgatgttgcacgtgagaaggaccggagacaccgccgtcatcacgacgaccgagagcgccctcaccgcagccatcgctacagatcccgctcacgatctcgcggccgagatcaccacagacggcgctcagtctcccgttctaggagtcgacccagccgcaaagacgaagaacatcagaaacgacgacggatggagcgcagctactcgccggctgagcgtcggcgacaccccgaacgcagacgagaccgagacgactatgatcgccgccattgagctacagaccagggatatgaattgatgcattagcttggcgttggagggatcgattcaaatgccggataaaccattgcgtaccactatcagaatgaccactatctaatctacgtgacgaacattttcacatcgagttcaatagcttacaactcgtcatgagtagtctttccgaatccggccaaatcaggcatggacatcatgttcaccaccatactagtccagccggtaaagtgctgtgttcgctggccattgcccgagtcagggttgtactgttcccaagcgaatccagtcctcttccactcgcggaagacattttcgaccaaattcttccgcaagtcagagtacatctctctcgcctgttcctggtgaggaccagaaaccgtcgcagtgtcctgtgaaggttctgtcagattcggcgggcaaataaatcaaaagatcgaagcacttacatagagattcttcaacaccaagtagttgatgttaatccagacaggacttctccaatagttttcgtcggtttcgtagaacttatccttcttgcttaagctgcggataccgtaatcactccacagctcctcgggatcaccgatcaagtccaacacagccttgagacgcgggctgtcaggacccaacataccagtcaggaaggggaagatggagatgtaacccttgtggcagacgtgcacactctcttcatattcatcaatggtcgcatcgcagaaggtttgctccttctcatcccagtgcaagtcatcgatgttacgagtgatagcgttctcgtaggaggcgaacttctcagcgtcttcctcctcaccaaggttctcagcaatgcgacgcatagcgcgagtcatcattcccatccaactgatcaaatcgacatgcagctcaccggggtgcggtggctgggctctggggtagtcatcgatgccagaagtgaggatgtgctgcactgaacgtccgcgccagcggtaaccttccttagtcgagaacgcttcacggtcatacgatttgatatcaccgcgctgagtatttctgtaccagttgtagtgcttcttcaggagcgggtagaatgagcgaaggtatgcttcagacagttccgggtgtcggacagtggcggaacgcaggctggcggtcgcatcttggttgtctagggatgcgaactcggtgctcttgtttttactggtcttgactttgtccataaatgcttccaaggccataaatagagtaggcgggtttgcgtaatgaggatattggaccgtaaactccgcaggtaccttgctgcgtgcctcttggccgagaatctgttcgcgggcaatccacccatcctcgtccattaagtggaaccagctcttgataatctcaagcctgtaaaagtcagtatcaggcaaaactagtgagtcaaacgaaagtgggtgtaaacgtacgcaagatcggtatcgtattcgatcacgggcatcaaatggaaaccttcgtcccaaaggaatcctctagggaagaaaggccgggagggaacgcaagtgaaaagctccttagggccttcgataacaggctgcgcggcagccctggcctcggcggtctcttcccagaagccttcattctcctcttcgtacgcagggtttgcggaccgatctacgacatcatcgccgtggaagaacccaatgccaccgatcaggttagataacattgccttggagaagctcgagtatttcggtgagtcaaatggcgcctgcggcggaagaagctcctcaaaggtttcagaaaatgaagccgaagcttcatcaatttctttagtaagggtttctgaagtcaaaggttcggaagcggatccggaggagaataggacatcgaactcgaatggaccgctgaaaaccttctggacaagctgagcgtttcccgggccaggtttgtgcttgatagtaaacagctgggccgggggcggaatgttctcttttccatactcttcaagggcttcgtcaacctctgccttcaattgagtgaagaagattcccttcgcttgccaaagttgctcctcagggaaagccacactagctacaatgctgcgatccaatggcttgtctgtggagctaggatgattgtagcgagggtgcgagttggtttccggtccagtggtgacatcgatagcgaaatcaccaagttctgcggagtatccttcgagcttgacattgccttccactccagtggattcagaggatgcagaatcggcctccaagcgaccgaatccctcgagagtggaataaaagataacggagatgggctggtcggggtctgcgccctccctaggcgtgcccttgactcggaatccccagctacctccgtgctggccaccgggtactttgatgaaatcgatgaccaagtccaaattgttcccagcgtcatgaatggtttcccgtccaccttttcggatatcgtactcatcccagccatacccagccattccttcattttgttcgcatgtgtgtctaaagtcttcggtagatgttagctttaattcaccaatgcaaccgggctgccaaggatcacatactttgttgagcaccagcataatcgtcaacctttccccagatcaaccccgccgaaagactcttcggaatgcgaggacgcaccccaaagtagagattcgacttgtaggggccccaaagcaaggactcgttgctggcacgtccggcctctcgaattaggacggacacatcattgggatcttcatttgcaacaatcccagtcgcatagagaagcgacgtcaataacactgaaatcccgaggttacgcattatgtagcctcattcaattgactgctgtcctccgcgcggcgttaagctataggtgtatgtatctccacttaccgcctactaaatacagactagtctcatatgcgtaccgcgtcacccatacccgcctttcctcgtcggctctagtgctcacgttgtctacaaactataaatgtcgtgctcatatcatagaaagggtgtactatatttttgcgatagacattgtgtgacaagtatctattcagatgaagtttcgtggatccaacgatccaatgtttgcgctcttcgccttgccatcaaatacaaactcactcatgagcttccctgtacccggcgcattctggataccccagcaggtatggccagctgcaacatacagtccctttacatcggtcaagccaattagtggcccaccgccagtttcacagttaggaagatagcaagcctggcgagcgcgaacctctccgtcgcgcagctcgtcagaaatgctacccacatgatctatgatttcctggcagcgcgtctggtcaacctggacatctgcagaagtctttggtaatgagaccgttctatctccgtcgccacatgcatagacggtgtcatcagggcgcgcgtagatctctggcgcagccacagttgggcgtgacttcttttcggggttgaagtcggccgggatttcgatgtttgtaaacaggcagtatgcgctgactggtttctttggctggatcaccacgctgtgggcccgcatgcctgagatggggacctctgggaggatagtcttcgtccagggaccagcagcaacgagcacatcggttgcggtgatggtttttgtttcacctgatgtcttatcagtgtatgtcactgactgcacagaacccttggaccgatcaatatctgtaacctgtccaagaatgatacttgcgccctcgtcctgggcgagctttgcaatagaggtagtgaagaagtatgggtgcacttgagcagtttcgcccggtccactcatattttcataggaccgcagaagatccggctcaatccaatccaagtcctgggggattttggcagacttcagcttcgacatagccgctgcactgcgtttcagcagagattccctatctccacccccggatttccctgcagtgtgctcggcaagagcacgacctctcacgacgagttggccacaattgacctctctgtatccccatcgattgataccatcgtgctcttttgcaagttcggcatgcagtttgtagctgagaccaacgatgttgcttgggaaagcccattgcgccagcatgccacccgctttgcctgatgcagcgccggcgatttcacaggcctcaatgagtgtaatcttgtgacgggtagggtcgtatgacgggtgtcttgtgaggtaatatgcagagcagcatccaatgatgccaccacctgtgaggattgtggttagcaagttgcgaataaacatgcggggtaggaaagtcgcgcaaacaatatgttcttaccaacaataacaatctcacgccgatctcctgttgctgacatcttaaattttggcgttaccttgggtgctaatgatcgcaaagaagccactgtgtagagggttagttgtagttgacaagtttgaacagcaggtgtgctcatatatagagaatgcctacgtcactggggatctagtctgtccagtcatatgtcgcatccgcaatcaagtcgtgaccggtttttatctacagatttggctatgaatcattgaatttttttggttcactaatatttgaagtaatgaaattggtagtaaatccacaaaggtttgggccatagaatgggaaggaaaaatatcaagccagcataaaaagtactccgcaaatgcatatcgtgtcgaaagaaggcagaaaatgtccagtgaatacaaagaagtgtgagaccgtaggaataggaaggatttaaaggttcatcgcgagggactgagaggccggttgaaaccaccctggcggttcatgtactgtcggtactcgatcttcttctccttccgcacaccatagatgtcgttaccggggattttggtgttctttgtagtccggaaccggctgaaacccatggtctttcgcatttgtgcttccatttcgtcttcgcccgcatcttcattgaagtccacgtccatcgcatcctcgtggcgatctggtcctggttgtgcgccattcgccttctgcccaacatctcgcgatcgagggtctttgcggtcgccatggcggtcactcttagggcctcgagggggtgaccgggcctttgtgccattgcgatgcggcgagcgggagcgcgaacgttcgcggaacttgacgttcttgggtgcattgcctgatatttatatgttagcatggcacgagtacttcaataattcaaatctttcaccaaccgcgtctatcctggttgcgctcccggctagtgctcctctttcggttctgggccccacgcccatctctgtcccggtcgcggcgatctcgagaccagcttctatctcgccttccatccttgcgttcttgtgagcgagagcgataccggccgtcgcgtcggtcatctcgtggagctggtgagcgtttgcggtcgcgatctgactcttgctctggtgcatgaggccgtttatcattcgaatcccacatagttgagctgtcgactcggcgagcacgttttgcaggtggctccgccattgttaaaaaggtctggtctagtctgggcgttgccccgtacaccttgggtgtttgaggcagctggggccagatgaggatggctttactcaaatttcaagagcttgagtaatgataataggtttaaggagccctaaagcgaatgcttgtagggatagaaatgtagagggtatcaagttgtcgcaatggatgtcggcctgaatctctcaggaccagagagaagtttattccggctccgggaagagacctgtcgtgcattttgtgacatggcagattgaccgatctatagccgtgacaaacaaattgtacggttgggattcaattttaaaactgctttgatcagtgtcatcaatagcctgatgcatcgcttgaataatcaaatgtgatatatctaaatgaacccaatgaaaccctatatgtacgagaaggagtatatgacttacgactgcactatggcactatctaagtatcttgcgcgatatatcgtaggtttatatggtatctcactacctatttcaccctattaatctacatttctcacctaaattcttcgtataattgataaaagcatttaaaaaaacatccaaaaagacgtccaaaaagagtactacaaaactaatattcttgttaatttaaattgctctatagggatagagcacgtataggtatagaaagtgttaagaatacagtaactagttagagaacaatttgaagtaatttgacatattccattgtgtcagattgaatcaaactgaaggtagcaatgcaaagcctcatagttccagatataaagtgatcgaagtggcacagcgaaaagaaaaatatgcaccaagttagattcagaaatcgatttctgctatattgataccaagtaggcccaaaaaatgtgttagatcggtagatcatggattgtttgaatcgctgattgagacaggcgatgttgtaaaccgtaggctgtccactgacgcactttcaaaacatgcctgagcactggatctcagggcactagccttgtctttgccttgtttgtcaggtgagctatgtatcatagttgcacctaacgacgatatagcatataagcaagtagattgcaaatgcagatgccaatttgaaaaattaggcatcaaaagggatgaagccatcgaagcagatgtggaaaaaggtgattctgactgtccgccacttttggagttggtttgaggagaacacctggcacttcatgcttgatcccactggactactattttgaccagagagataattgtcacgtaggagagcactttgaggcctgtcaggaacaatcaaataaatctgctgtatttattaggtccagctcctgtagaaaactcgaatggtagagaagtcctgtcgtctcaatactttcctccatatgtagctttattgaccaagcataaattgagaggcgcagccaattatccggtctcagggaaagtaactggagtattggagaaaggcctcatcaatttctggtgttttctcaccgatgcggctcatctccgcatagttgaagttaccattcatccaattcgcagactctgaaaccaattcagtggagggctgttcaattgagttgccacttctcgcaatggcggatattgatgattcctcattggtagagcttgaaaccaaggggctgggttggagtttgagatgaacggtgatagggtctaccatggatggcagagtttgccctattttggtaagtaacaggggaagaagccttcgacggcccccgggaaggtcgtgtatgagagtaaagaaatgcttgagataatcctgcgggccaagcttgaagcccgaagaacgtagtctagccgttgagaggcatgccatgacatcaatcaaggtgcacgccacctcaaatattttttcaatctacagtatgttagaaaatgcttggtatgtttaaaggtaagccatacaagaccaattccgtgagtttccatactctgcctggataatttccatgtcgcaaagcagagatcttcagcaattaggagggggtagcgaaaatccatgcattcatgactaggctttgtcgaaagaaacccagcagttgtagatagttgccatatcatgatacgcagccactgctgagacacacgcaagtctgccatgagtatatcaggcagatcaaggtctgccgggactgcactttggataagctcctcaaggcgaaccagcgactcaatcgagcatgtggcattcgttccattccactggctcagaaaactttcgtcaaatgggcggtagaggtttaccagacaccgaaagccaatggctgatgcattttctagtacattgtcttccaattgagttggaagtgggtcgtcttctaatcgagggctttcgggagtgacctgtagcgtaataggtctatgtcggcgaatagcgtgagctctgtcaccgtgttagcgaattactaatgaataggcgaagaaaatacctctcggacacgactaggagccaaaacaatttgcctgccaaggaagggtcatcgtcatccacctgcgccgatgatgcttgactttccagtgcgctagctgtataaagtgtcgtcgattcgcggagaaaataatatgcatgccgttggtttccaagtccaatatgacatccatacagaaggaaagcgatgataatgctttgccgtataggatccgtgaatggatcgatatgctttcgagcttcagtggcttcctcaatcagggaatttcggtagtcttcggtacaaaaaacccgagagaattccaaagatgaatgctccacggcaaatccggtttgagtgaccacaaaagcgcagaaagcagtgactagacaataagcatggaggcatgtatcggcaaggtccacccgtttctgaaagctgccgggttgtaaaacgggcactgttcctctcattcgcgagaaaaaataccccgagcaggcgttgacaagctccccgctcacaaggcccggggttttcgcgaactgacatcttcccgaggtttgtagtgactggggagttggtatagtatccccgagccctagagccattgatggcggagaaatattcgcatcctgtgccagcgcctgttcaatttggtttgctctgagttcattgagaatattggctgtttggccctgtctccccttcttctgtcgttgcgaggaggttcggcagaccaggccagcagctcgacactgctcacaaggttttgggaaaatacatttgactttacgtcggcgacatgcatcacatgcttgcttggccggtgggtctggcatctgggaattcaggtacaaatataccgagaggaactagcagaacgcaaagatccggggttgcggggggaagtcggggggaagtcgggaagaaatgggaattgtggccttgtttgtcaggccccaacatccggtagactcctaattcattctcttccctgtatccattgtgacttaattcgtagtactagtggagactatgtttctattcacattgtcattttgtgttcagaaaagaagaagccaattctaaaggcctagggaaatcccctcaggggtttcctgctgagctacaagccgtggaatgctgagaaattagcgacatcggggaatattataaccaggcgtatgctacgcagaatattatcctaggaaagcaagatttcaacaaacatttatagaaacatattgctggttggtattctacgggatatatctcagatataaacacgtccttcgaagggcttcagggtttccagcaatgaatcggagtagttgcccactagcaacttcatacccgcagtactcgcagcctgtgtgaatggctgagatctattagtaaagttcagaatgaccaatgcccgtttatcttgtctcgacttgacaaaacaaaacgtctcttgattctcgtagtcaagtacttcaaatgcaccgtggatgaataactcccggtgctctttcctcagacgtagaacgtttttccagaaagacaacacactagatgcatcactctcctgtctcttcacattgatctcaccatagagatcatgagctcgcatccacggtttcccggtagtgaaaccagcatgttccgagccatcccactgcatcggcagcctggaatgatcgcgagccaggattcgaagaccatccatgatctgctccttgcgagtaggatcggctccactctcactgcgctgctctgcttcccggtaataccccaatccttcaatgtccttgtattcctcaatgggccactcgcgtggtgcattgatcatgccaatctcctgtccctgatatatgaacagagtgccagtcatagtaatcatcatcagagccagcattttggcagagatctcccggaactcgggtgaatccgatccaaatcgagagacagaacgcccgttgtcatgattttcacagaaagcggtggtccagccatccgttccctcaataaaagactgccacttctgcacaatggatttcatctttgtcaacttccacggcgtaaagatgtacttctcctctagggtgggtcccatgccaatatggccgatgtccaagtggaagaccatactaagttctttagccgatgctcccacatattcgatgacgttcttgggatcaggtgtattggctagttcgcccacagtcatgacatccccgtacggagcaaatgactcttcatacatttcgcgcaggaactcgtgaatccgggggccgttgcaccacattccgatggcgggttggatgtaacttttcgggtctgtgatgggggcatctggaaagtttgtatgcttgctgtacttgttcactgtgtccactcggaaaccgtcgacacctttgtctagccagaatcggactgcgctgttgtagatagcctcacgcgtggctttgttattccagttgagatcaggttgttctttggcgtatagatgcagatagtattcttgcgttttctcgtcccaggtccctacatgaaagcatcgtgagttcaagtatactgattattgccaaatatttcaactcacatgtacttcccgcaaaataaccgcgataattgctcggaggcatccgatttcctgcctcatcatatcgaggagggcgccaaaagtaccaatcgcgtttatcattgtccttgctgctccgactttcctggaaccaagcatgctgatcactggtatggttgacgacaagatctagaatcaatttcatgcctcgcgagtgacacgcttccacaagattctccacatcttgtacggttccataagcagggagaacattctcatagtcggagatatcatagcccatatcgtgcatgggtgagtcgtacatcggcgatagccaaacgacatcaacccctagcgactgaaggtaatcgacctttttgacaacacctgggatatccccccagccatccccgttggtgtcatagaaggaagccgggtataccttcgaatcgaggacacaaaagtcaatactgtgtcttgaggaataccttcatgttctcgcaactaacctgatagacagtggcttctttccaccagttatttgtccccgtaggaacaaccgtatcctgtgtcgcatgtggtgacattgtggcttgacacctttattttccaccaggacacccctcttataccttttcatcataactcggcatcaattcggcctgggcaaacgtgggggtagaccctgcataccgccaagcctccggatggatgctgcgcctccgactaacaaccgacttgccgccgacaggctccgtcctggcacgctgattcgtcacatctagacctccacactccggcttccccagtttttcgaatttttggaagcgagtgacagcccatatgcattttccccggatacgcgatggacgtggactaagtcatgcgtgtatcttggacttgagatcttttgtataaatgacgcatcgccccatggtttgtcagtcctgataatgtctgaagtattgggatagtatcagctttcgattctgattaggccttgacaagaaactattgttcgaatcttcgaaatcgcaacacaagttccaatggtgtccatggacgacgaatccgcgagcatggacggcaaagtctcccctgtccttgcagaaggcagactagcatccaggaaggagcagtccatgactctctggcaggctctgcggctatacccaaaagccgttggctggtcagtcctcctttcgtccactctgatcatggaagggtacgatctcgcattgttgagctcaatgtacgcatcacccgcgttcaaccagaagttcggagaacagactgcctcggggaaatgggctgttccggcatcttggcaatccggcctttctaatggggcacgctgtggtgaagtcattgggcttctgatcaatggtctggtctctgagcgcctgggatatcgaaagaccatggtctgtgccttgaccaccatcacagcagtcatttttctgtttttcttcgcagtcaatattcagatgttgctggccgccgagattctcgcgggtatcccttggggtatcttccagactttgccagccgcatacgcctccgaggtttgtccggtagtcctgcgaccttatctgaccactttcatcaatatgtgttgggtatttgggcagttcgtggctattggcgtcaaccgcggttctatttctcgcgatgatcaatgggcctggcgcattcctttcggtgtgcaatgggtgtggccaatcccaatcattatcggctgtcttttcgcacctgaatccccttggtggcatgtgcgtcggggtaatgtgcaaggagcccgacgagcgttgcagcggttgacatcgtccaatgaccccaactttgaccccgaagagacgattgctatgattcaacacaccaatgagttggagaaatcactttccagtgggaccacatattgggattgcttcaagggaacaaatcttcgacggactgaggtagtttgtcttgtctggttagtgcagaccctatgtggccagaatttgatgggttatttcgcctatttctgtgtccaagcaggactgcctaccgttcaatctttcaatctatccctgggacaatacggcctcggcgttttaggcacaattggatcgtggttcctaatgtcctacgcgggccgacgaactatccacatctccggtctcgccagtcttttcgtccttctggtcatcacgggatctctttcttttgcaccgggagacaacaacgcagctaaatgggcaatcggcgtgatgctaatcattttcacattctgttatgacatcagcgtcggccctgtcacatactctctagtctcagaactatcttccactcgtctcaaagcaaagacgatcgtcctcgcccggtgtctatacaatatcagtaacattgtcgtcaatgtcctgaccaactatcagcttaactccacagcctggaactggggtgctcggtgtgcctatttctgggctggtacgtgtctagcctccctggtctgggcattcttccggctccccgagccaaaaggacgcacatatgaggagttggatttgctcttcgagcgcggagttccggcgaggaaattcgcgaccaccgttgttgatccatatgaaggagaggcgacagaggtccatgaggctcatgcggataaagattgaaagtatagcgatgtatccagtcccccgggtaatgccagatatgtaatatatagttagggtgttgttagtatagttattggaactaccaaaaatatcacaattggcttttttcgttcttccatctcacatcgtattaaatgtcaccactgaaaaaagaccgcaagtcccacattatccattacactacataatcggaaactatattagaccaataagctacgccataaacctgagtcagtctgactatcggatttctcatttatgcttacacatattgaagttactcgattcatgctctgagtccacgttcttccatgagctccaatcggtactctttagctttctccatagtcataaggggctccaggtgactttgaacgatatactgtagctccacttgtagctttgccaaagcctgattcacagcacgaaatttctcttgttgaggttcaaagctgggaagaatagaagaacgggtatttatttcctaatctactagggtcggtttcctattgtcaattgcatttacaaggcacaaggaaagataggacaggatgggtaagtgcgctcaattgatgtccgagttgacaaataaggaagtagagaccggcgtaacccgtctgaggtgattcaccacctttctttccccatgataactcccttcatcaccgatacgctaacattgtctgtctattccgtttgttcacattgttttcgaagcaccttctgtctgccccacagaaatggctagcccgcgggccggctcgtggagcctcaactttaaatcccaccacgaaattttcgcagcacaaccccacttcctatgtggtcgtcaacctacgtctccagaaagcaattagacgagaagagtatttaatatcaagaaaagatggcccctatcaatctttcacacaggcgaacgcacaacttactcttgatttcgaaactcttgagcttgcgtgacactgcatcgcccctcacgcttgtcttagattctttggagcaaccggctacgccactcctgaaagaatatatcagacgtgcaaaggtatattggctgaaaattataccactagcgacatctggctcactaggtacggggtggacagccatgctgactagttcgacagctatccaaagtccatgtcacactcgtcgcttttgaaaccctgaagcaaccggatggagtcgatgcttttgtatcaacacgccgcaagagccctgccgatatagttaaagaagtgagcgcagtttatcagcctgttgcagcctccaactcctcacgcagtaagcattgtggatttaaccccgctagtggacgtatacttactgcccgagtagggcgtcttatcctcattgactctattaacccccttctgaactcaaaaagagtcgaccctggatttgatttaccctccttccttggctcgattattgctcccacttcgccatcggccaaggttgatgtgtcactcgtgatgacacatcatcaagatgtccccgaacttccacagcaaagtccctactcaccatctcctatttctgtgttgacatacctcgctacgagcatcatcacacttcattcgttctcgcacgttctagcacagaaggctgctcgcgaccgcagtctggctcctccagtcttcgggcttgaggaagagcaagaaggcattctcctcggccgattggacagattggctggtactggccaagccgagggaattgttattgaactggagcacaggcggaagagtggccgtggtgtactggaatggtaccttctcccgcctgcctcacggtattcgccacagcatccgaaagagatcgtgacgttgcttgacgataatgttctgtacaatcctcctatggagcgagatccaagcgcgggtgatgaggaaccaacgtcgacctttgagctgggtctcaccgaccgacagaggcgcgaaagagaaggtgttgtgttgccgtacttcgacgcacagcataacgatggcccaggcgaaggaggtcggattctttacgacatgggagaggaagacgatttcgatgaagaagaggatgagatttagacatcatcaaatacgatacatgttcaagcaattctctgtgttctagaatcggcggattgtaacccgcaatcaccgaggtattaactatgcgtacattcatacagcgaggcctatgagcatggccacggagagcaaggaatcagaagaatcgccagaaaagaaggatgcaaatgacaagcccgacgccagcgaaaggtccatactgtgagatggttagccaagatcgctcaggggaaatctgacgcaaagtatagacccacctgcttcagcaacaattcccagttgatgcgtacagccgcctttctgtattttttgctatcctcgcggagtcgccccgacagttcacccatccgctccaaactatcgcctcgatacaagaggtcctcgatgttctttgtcatcaccttggtgacatcacggagctcatcgttcagcttgtcaagattctgagacgcgcgactgtcttggtacaatttctttgtgcgctggataaaggtatcaaactcgacaaaggcatagggacggaggtttggtgagaggtactgtgaggaggtataggtagtcgtgaattcggaggccagatcagcgagataggtaaatgcgagtttgcgggggtaggacttgtcgcaaatgcatagaaagcatatatcgtcctgaattgtgtagctgaaaggcatgtgagagattgtccattggcaatgtttgttgattgctggctgcgacttactgtagactgtattggccagactcaatactggcttggggtgcggagttgcggttcaatcgccgaaatatcattttagcctgactcttaatctcagagagctccgattcagcctacggatattgtaagctccagatcagcttaaataatcgttgtcacgtacctgctcgtcgtcgaccgaggctgccagcataaggcctgtttcactttgacatcagcactacgcatcctcccaacctcgcagagagttcctcaccgtcgagccttgcaatctgcgttgacctcaccatcctgaaagcgttgctcttttgttctgaaggacagcgctttcccctttgttttgctgtgagaatggctccgaggaagagcgacgcaaaggcggtaggaaggtcccgtgcggcagaaccacggtgagcatttgcttatcactctcctttccactgacgtcttataataatgccatagtactgctagttctgccgatatagcagaacagttaggtctcgtcatgtcgaccccaacatctgaagcgggctcacaagctaggaccccaagaagacctgctgctagagggaaatggagcgaggagcagctattgacgagcgataagtccctgcttattgatatggatctagtggtatgagccaatcctttacaaatgcgataccagattatctaagctaacgataggctaaaaatttctagaaactgctggcgcgacctgaagcatggaattgccttgaggaaagtgaaaagcgcgaaatcctctctctacttcccccagatgttcatccggaggcagaagctatatcggatgaccctaacgcaaagatcaaacccattcccgactcttttctccgctattcaaacaactggcgcgacggcattcgacagttccagctcgatctccaacacggccgttacgacccccaatggctgcgggaggcgcaggaagccaaacaggagcgcgaagacggcgactttgacgacttcaaagagcgggaatatgaagagttctggggccagaagcaaaaagtcaactggtatgcgatggctggagaaagtgcgagtgtgaggttgggaactcttatagatgaaggtgttatacagccgggcgatatctggaaattctaccatattttcggtaggggctctggcagaattatcatcgaaaaggaagtcatggtatgtatagatctatccactccgtatactgctctgccatttactaactactacaggtccttgactgtgttgggccaagattgacttttgcgattccacccggtgaacgagtctttcttcgaagcaatttcgataaggcggggtcattttcgataccagagaagggaaaagaagatatgaaagtcgacatcgacacacagctacagccatcgcaggccactcacgcaacttccgatggcgaggagataaaggtcgacaccggtaaagcgccacatgaggtctttacatcctccactgagataaatagcgataccgataccgctaccggcacacagccagtcatttcaccttcaaataacgaagagagccaacaagataccccattcagcgttgttattttcagccctggtggtacgcgaaatcgaaaacccaagcgcacgattcctgagccagaacctcaacccccagtgaaaaagagaggacgaccacgtaaaacccagccaaagcaatccgaaccgccgtcccaaaaagtcgaggttccccaggaaatagaagtgtcccaacgcgatgagcagaataccacggattctttttctgtgatgagaatcttgactgcaaaaatcgcagaaaataacagagctgcagcagaatcctccccccaaaagccctcgtgggcagaatcccccttttcggtactttcttccacctctgagccctcagagctccttggaccacatttatctacacacattgaggcacccgctgaggctgagcgggatgaaattaataaacccccaaataccgaacaacagaaagatccagtcccaattccgcctccaactactgatagtgagccggacgagatcatcgttcccaatatcccctcgccaggagcactcgtcttgaagattctacaaatcgatggccgcaagccgaccagccgtacagggaatgcctggaagtcactccgctgctaccgaaacaaccaggacatgggaagcctctttgatgtgcgagaggcatggttccttcaacatggacaacctcggtagctaccttccacttctaaccttccacttctaacatggaaatatcgatacaccagactcgcttacattattacccttgatatcacccatggttgcgaggattaggatgaaaaatgttcggtacatgaccaagttaggtagcttacaatgaacaaatgaacctcaagatgtcggaatacaggaaggatactggtaattttcatacttgatacatatggatcatgtgatataaccaggtgtttgtcttgtttcgacttgtcgatggtcctttctaccaacctatgctttgcaggcaataccttgcaggggactatatgagagctggcaagtccatagtcacctgaaagataatccaagtattgagtaagccttgctgaacaagagaagaagaagtgtcaccctttcctaaagaattatttctgctaactaaacaggactctcaaaaaagattataattacacatgatgcttcacaaaatgaaaggcgccataatagccaacgccatccatgaatcccagctcgccgacaatgagccggcaataccggaggcagtttctggtgttgctgccgcgagagtcgcgttatctgtggatgattccgtcgccgatggggagtcggatgattgagacggttcagatgattcagacgcagtatttgatgcatctcctgggctagacgacgaagtcacaatattggtgcttgaggcagctgtaatggtcggctccgtgctggaaggctccgacgtgctgcttggctccgacgtgctacttgactccgatgtgctggaaggctccaagatacttgtagagatagaagtaatcgtaggctccgaagcactctcagtagtgggagcttccgcagtctcagttggaaacgtaagggaaggggggatcgtcatagttggaataggcgcgggaatgaaattggttgctcgttgacaaaagttgccgccaagtgtagggcagttatatccaatattacagcagcctccatcggcacaattgggaccgccattacagccagttgcgcacctaggtttgcctgatataaatgtgcaagcggagccagaagggcaacatcccccagtcccatctctgcacagtgtttctgttgcttcggggcatgtttgctcctgtcgaggaatgagagctccggtgacgatcgcggcagcttgtatcctccactcggcggcgttggcaaggtggcagcctagggctacggccaagatagtctgccaagcgtgcatggcgggaggattggggggtttgcttgagataaagaaactaggaactcaagactaacgtgggacttcgcgtcctaatgaaagcgtagaaggaggtagatttgatcctacccggatccgaggaaatcgaccccagtcttatactagtctattccgtgcccaaaatgtccctgaaaatgttatctgagtcgtactccgtatgcctccttcatgcttgtgggcaggagctcgtattcaaccccgctctctcgttacttgcaacccgatctcgtattcatatacggagtatgttaatctagcctatatttggcctacttcttcgtattccatgaggctcaagcggcctgtcacccggggaaccaaatgggggtggctgatttgggtatctctgcccatagccagcaagtctgggtttgtaacaggcgaactcaccagtccataattggaaggtgaaaaatggtggccaagagaaatcaatatacggagtgtgtggagtagagcaatgaatcacggatttagggaaactgtgcagagtatctggaaaatatatctgaaatgtatgatggagggtggctaatatatgtctccttatgaactatacctgactaggagtatcacctatttaggaaagagtgatttagccttggacgactcaaatttatctgccaagcccctagcaactcttcctacttttgcagaacccctcctcgctttgcttgactgaactatgggacggtatggtaggattggtgagcattgaacagcattggtcagagtcgactcttaattttagagtaatataagctggcagcgaaataactatcaaactcccgagctcattggttaaccgaaagagaaatataatattatccactaaggcccgtcatttgatccagatatagcgggcataggatctgagtccgtggtaacatcaacagcaaaactagcctgtataaagtcctctaactcttcactcacagtcttgagcttctccttgacactcgcaacaccttcttgtccaacaatatgccgcgaaggagggttttcatggccaccaattgatgtaatggcatatactgtttcagagaccagcacttcaagatgtgcggagcttaatggtgggtgcatggagacaacttctggagcggagaatgggccattttcaatggagctaactcgggcgttctcatcgtttgttggacttggtgtgactggactctcagatgagacagaagcaccgggaagttgggggacaaggtggtttaagattccacggaagagaggcgcttggttgctggcgggtgagtaggcggggaagattggagggacactggttactaggttggtgaggatgccaatttcgatgctgcattggaagatggtgagtttgatgttaaacggggcaatttcgtaagccagactctgtaaaatagattaggttctgcgctaaggaccactccagagatactcacatcacagaatccttcaagggcccaacccgctgcgcagtacattcctagtccgggtgtaccgatatgcgccgctgtatatcgttagaccaatattcaagcaagagacagtatatatttcttactgatccctgatattatcatcacatgcccagcgcgctctttcctcatatgggggagcgcagctttgatgatattgaggggaccgaaatagttaacctcgaattgatcgcgtacaagattcatggtttgagttgaagcagaaagttcctcaactgttccaatcagggcttggggtaggtcagtatactgtttgagggtatcttcagaaatgtagggtcaccttgacttgtacagcatagaagtatgtctactcttccaaatgtaatgactgcatctgccacgactgcctggcactctcccatcattctgtgccaaaagactgtcagcaattaagatcagaattcataatcgagatgtctgccttaatgatcgcaccggatatctagcggaactgtcttcatgcgctgtgcccagccatcgtgttgccccacctcatcgagaaaagcatcaaattcatcccggcgacgttcatcccgttccaaagctgtatgtgctaatccaagaaacgcatagtctccatgcgcgaggacctgccgcgcgactgagaggccaatgggtgaatcccccgcggtgatcagccatactcgaggctcattatgcgacgggaattgcacgcgggcatcaaaggggaggttattttccatgagggtcaacgccaacagtcgaacgcactatccatcacgcgattgcaatttcaaagctgcttaatagcaaagtataagaatggaagatgcccgaaggtcggaagacaaatgccaagaccgagcaagttcccgggcctcgatctaatcgcgtgctaatcgcccacgttagctggccttttggcttcttcttttcttttcctcatccatcatgtcggaacaaaggccacgcagacaggaggagtcatccggtgtatgtgtcgctgattcaatgttgttgtgttcaatttactgactccctttagtcgggcttcaagggggcccttcagggtcttggaatcttcttgttggtccaatttgccatcagccagtacatgggaaacaaggacaagacagactctcccagcttgaattctgatggcatccctgcatttgccgatcgccccgatcccagcgaagtcgccgaacacagtgctcttcctgagaccatcgccccaatctggccctcctccagcgctgtcgatctcagcatttatgtaaccccgtctatcattgtgcccaacttcaagtcaccggacagtattcttgtggtagacgagaagaacttcacaattggaaactacagtgacactcgcgaaatcgacaccaccatcaaggtcccaaagcaggtccagcagaatggaactctctgggctcacttctttttggctcgtaccggatacccgctagacccaaccgctaagaactacaacaccgctgatgcagttcacttcatccgacctctgaaccagtacctccccaagaagaaggtcaagaagctgaagaaccttctctcgggccccgaggatgatcatgaccaggaggaagataacaccccggatatttcaaccatgtcatactatcaccccaacttcaccctgtccctgatcccagactccggagttcagaagttggcccagatgaaccccgcagctcgccagtatgtgcagctcgagcggactggtgcccgcgatgctagtggaaagaatggatggtactaccctatcgctttcttcaacaccttctggcaactgaagacccatatgaccgagttgaactctaccgtcgagaccgtgccgttgcatattactctcaacaacatggcgaactggaagttcaacatcatcagcagtgttgatgaaggctcgaaacaaagttcccgccaggctgcttatggcaagcctgctcctggtggtggagatggaactgagtgggagatggtaaaggaggttctcttggatacgaacatttggctcctctgcaccacgggtgtggtcactatcttccatatgttgtttgagactttggccttcaagaacgatattgtaagtgatatctccctatcaaaacgtgtggtatgtagcgtcgctaacattgtcactttctaggcccactggcgtaagaagaaggacattgttggcacttcagttcgcacaatcttggcaaacgtcttcatgcaggctgtcatcttcctctacctcatggacaacagtgaaaacacctcttggatgatcatgggcagtcaaggatttggtatacttctggaattctggaagattaccaagaccgtcgacgttcgcttgcgcccaccgccagccagctcttggttgtcgttcttgccctatgtgattgtcttcgaggacaagcacaagcttagcgagaccgaggagaagactaaggagtacgatgaaattgcgttccagtacttgtatatcttggctgttcccctcctgctcgcatacgccgcgtacagcctagtctacaatacccacaagtcttggtactcttacgttatccagacactggtgggcagcgtctacgcctacggcttcctcatgatggtccccagtctctatatcaactaccggttgaagtctgttgcccacatgcccggcaaggccttgacctacaagttcctgaacaccttcatcgacgatctcttcgccttcaccgtcaagatgccctggctccatcgcctggctactctccgcgacgacgttattttcttcgtctggctctaccaaggctggaagtacaaggttgactacaagcgcgtcaacgaattcggccagggaggtgacagtgacgaggaggaggagcctactcctgctgttgagggtgacaagaaggaggagcctactgatgctgttgaaggtgacaagaaggaggaagtggctacccaatcctcttccaagacaacttctaagtcgtctactcgcaagaggaaatgaactgctcagatgcaggtcttttcggcccatagaccgatgaaccatggatcaacgcctttgcataattagtaaatcactcgatttcactacttttggcatgatgctggtgagcattggatcataattattacaatgtcgtagcaagcaatgtttaattccgatccttctaattgaggattcctctagaaaatcactatagagttccggtctttattcatccagcaccatagaagtacaagagaaaagaaactaacaattatgatatgatcaaataatagacgaaggtcgaagtcgttgttgataattacccgattaggcttagggcaattttcgcatctccgcgcccgcttgttcttctatgcaactgccgttggatacatctaaaacattcattgctttgattctattagtttcaagactattgccaggaattgcacacaaccaaccagattgttgtttttcgacgcgccccaattgaggacgaagcatcgcgcgactacgcgctaataccaccatcccaaagcaaagtacattctgtcattctcgacgacacaccaattgtggcaattttacaatagaattcatgtagatggatgtcgacataggtcagttctgtttgtatcctttcagttgaaccacgctaacaattatccaggaagcaaccggccaaacggcctactcgatgcggtcgagcacttggaagctggtatggacaaagcctcttgagacggaaaaacatgttactaatgcaatctggtagttgcatttgtgccccctaagcagagatacacagatgccagtctactagccaaaaccatcgcttcaagcgcgtatgagagcggcattccgcaacccgtgctggcccgtctcctgaagattctgaccacgaagaataacctagaccagggcactgctacaacgctgatcaaaaacctgtacccccaggagaggatcgcgtctaagaatgtcactcaagtggtctgctgccttgggcccagcaagaacaaaccgagcctcgccacacaggctttgctattgcgctggctaattcttgcgtatgaccttttcgaagataggacgcatctcgccaagctttatgctgtacttttcaattatttggacatgattagtttgcggaaaccgctgtgtcaccttctctcactcatcacaagacgaaagcacgtcaagccattccgcattcaagccttgatggagttgatacatactgctggtggtgaagataaagagcttatcagccttctgaggattttcaagaattattaccccgagatcattctcggtgagttcggaggatcgagaaggaatgccctcttcttcaaacacccagacccggagtggtcaagccatgtgaaggtgctgcaagatcagaatatggaaagagtgcaggccggccagggatcgagtttccaagttgttcatcgagggactgtgaaaagaagtaggattgaagtggtcattccgactctacaaacttcacgggtatctcataagcacacgtcgctggaggagcttcgtgatattggccattttgtcgacaagcttgacaagatcgaattaccaaatcagattatctcaactctgggggatgcaatggctcagaaatatcttcacctggtccaatccgaacttgcaaatcatcgtctaaatgagtggctgagaagtttcctggaggataagctggaattgctacgtgaggatgaggatgatgaacccgagacgttatcatatgtgttgggttttgttgtggggtatgcatcctatatcaaggtatggttttcagacagatcattgtcaattcagacattaaccaaatattaggacctcccatcctcgatacgttcattcttgaagtcttatctggaaacgtggaatggcaaggataatcgtgaccacgtcttccggcttctccagtacattcccattgaatctttcgcgtcgcttcgaagtgaattatggtcaccattggagtcagctgtgttggacgagagtcttcgttccagaacagcgttgttgggtttctattcagccttaatcaaccaatggggtgtgaaactccgatcacagtcagacaaaacagaagaatcggtgtatctcagtcaaatcatcgtacacgccgagctcctagcctcttcgattctggagttctcggtggaggatgaggataaaaagtccaagccagctacagtctctgtgctcgacttctacaaaaccctttcagaactcttttctcatgcaccacaagacgcccgattccgcatcacacttccgtacgcgcaaaccgtgtacacactcgccttcacgcctagcatcgccgtgctctcaaccctcaactccatattggccgtctacaaatctgcattcgaggcctctctgagttcacaagttctccaagcacaaaactccccggcttatggaacagatctcgttggtcggttcaacggatatgtcatggacatgtgcaatgtgctatggcgcaaccgtgcacttaacaccgaagacccgaatgcgctaggctgtctcgtcccagcaccgactaccactgcgttgacaaactatatcaagggcctgtccgaagcatccaaacactatgaccgcgaaagcgctttccacattaatcttacatctatattctctcttagtcaccacgctgcaatttgcaacctgtctgcagcttgctttgcggatctggaagaggaccagcaagttgcggatgaccgcccgaaattcagaaagccagtcacccagaaagcgctacaggcgctggagagggatggcggtgctaagattacatggcaggagtaccgtgtgcatatgctggactggttggatgcgattgggtgccggggtactggcgttctgatgagaagcacaatgaaggctttgcgcaaagagtaaactcatagtcggatgaaactgaacaccagttctagaaattaaatttctcatagcgccattgaaatgcttggtatcggtataatacatattgtacatgctcggctctcgatatgagacagacggcagcatagcggcgaagaggtcagaacttctctatcgagttcagatatatatcttgaacactgggatcttcccgcagagcactcaataggtcctcaagatctttcgcttgttcctcgtccttaaccacgaccatgctgtcccggttgggatcccagaatatctccaattcgtcaatgctgagacctgacaatttcgcgaatgtttcgcccacagtttttgtctctgacggatcggtcaagatcacgaggcgacccttatcatcggtggtgatgtccgccgctcctgcttcgatcgcctggtccaagtagtcgtctacattcgcaccatctttcttctccataacaactctccctttcctctcaaagaggaatgtagtcggggtgacgattcctccattgtctttaatcatatagcgaatgtcctgtagcacgcgcgccttctgatccgtttgacactctacaaccgcagccactgaaccaggcagcatagcctcaattgtcagagattctagtgcttgacccgatacactgagtccttgtccgcgagcgattgctgcttcgataatgattttcgggatggaggctcgtttcgcattcgacaacgcgagggctagacgaggattgtacttcgtgtcgggtccccacactagaacatagtattaggatctgagatatgcaaaattgaacggccatacgtactctgtgtagcattggcaatttcctttcccactatttggcgttccctgctcttggccttgtcgtttctggccttgtcatgcttaatcgtagaccatttgttgtgaccggagaggatagccgatgtggtgctgaagtagcgacactcatgacaagcagagtcaacccagcgggattgttgcagcagcctgctaagtctgagagccataatggttttccttctccatatactgtgagttgtagagaagatcggatcgccattgagattccctcgggcggctgtttatccgatctccgcggacagtgaggccacacgataaggggagagacctggggttgacgcaactactatgaactagatatttccaccttttttccctttctttcttgcttatggagctacgcccgcactgaacctatctcatgtcttcctccgatacagccccagcaccctcccctccacaaaatggggtccctgagctcgatgtccctaaactacacgccctcccctctgaacaacaggaactgtacatgcttacgttcacctccgacctcgtgcaatacatatctgaattggaagccgcagaggttacattgcaacaaaaggatctcaaaaaggaattgttcaagatcttgaacctcccttcacccactatcactcgagtcctccgcaacaatctagggcgatgttttggcggaatactcagtaaaggggatcgcgggatcctcttcgaaacaatcacagacctgctggcaattgtgaatgctggcaagagtgaagccgaattaaagattaaatttgctgcggcgcattgtttaggagaggtctttgcgacagctggtgagagtgcgttcatgcagtccaatgttgcgatttcgggcgcactcaaactactgaaatcagcgaacaaccacaccggtcttagaggagttatctttgccgtgctgcgcaagattgtggttggaattggagttcccatcgatgaagcaaccgctcgcgacatctggaagcaggcccgcaacgctgctatcaacgacaagtcgactttcgtccaagtcaatgcgtgccgctgcctggagcagttggtcaccacgaccccattcttcgataacacacatgacttcgaccacctcaagacccttgtatggaaggttatcgacagccccgccgcgccagtgcggcacgccgtagctgcggttctcggtcgggcattaattaagctacatgctacggatgcgcacatcacagccgccccgaaaccgaaatcgaagaaatcgaagcgcatgtcgaagaaacctggcgcggggcttggagatgaggaggatgccgaggtgtcagagtcatcggtccctaagaaaaccgactcgcgcctgtacttccttcttccagacttgttgaggcagctttcatcccaatacctgaagagtaccacttcgaatcgctcacgcgcggggatttgtatgtgctacaaatatgttgtgcgcaatctgggagacaaggttgtcgaagagcgttatggtcagattgcgacgaacttgcttgtcgagttgttgaatcatccaacagtcacatacaatcgtttccgcctccttatgactaggaagtttatcaaaagtattcttgaagataccattggccaggaattgctgcgcgagaacagtcaactcaatgccgcaacatggctcaccaacgatatcctcaaggactacccccaggttattcaagaacgtcgcgaacccaccaagtacacactgacgagtgcggtcagcgctctgtcttcgttgatctcatcgcttggttccgccttcagcgttcaggctgatagctgccgagatgctctgcttcaagtccttcctcaccccagctacactgttcaagtccacgttgcgcattgcctgcgaaacttcgtcctagcctcccctcaccagctgttgtcatgtgtgacaatctgcatgaacagtttgaacagagaaatcggacagctaggcaccccgcgccaatcgcctcgccggtgtgttggatatgccaatggattatctgcaatgctaagtacttctcgtttgcaaccactttatggagcagtggatgtctttgcgcgcgtttttacccaggcaaccgatcttcttaagacaagcagcacctccgagcttcgggttgcgagcatccaaatccaggtagcgtggattctgattggaggtttgatgcctcttggaccaagcttcgtcaagactcatctgtctcaattgatgcttctctggaagaacgctctgcccaagcacctcggcaaggagaacgctgcgcagccaggtacagttgagaccagtttcctgactcatgtgcgagagtgtgcactaggctcgttgttggtgttcatggagttcaacagcaaattgatcacatcagatggtgcaaagagaattggtgcgatgttgcaacatacggtcgaatttttagacaacttgcctaagccaaaggctatggaagatctttcacaaagactgcacccatccctgcaattgcaagattattcaactatggtccgccgacgtgtcttgcagtgttttacgaagcttgtgcatgtccatccacctagccatggggatattatttctcaatccagtcttcttagcctggctatttcttcattcgcagacccagatgctcagtacaagcaactagaaagctctatttctggctccgccggacaattcgatggtttatgggatctatgtgataattatgggtttggtgtcactggactctgccgagaatatattcgtgctacactgtctggcactcaagaagacgacaagagtcccgcttggtgtgcacttgactctgtggaccaagttgtggacgacaccttaactttccctatttgtcaagcaagcgaacacgacgcggttcttctatacagtttgcgagatggagataagcttgctgttgatcccccgacaacaggagttgtcaactcggcaatcgatttgttttctgtggctcttgctcttcattcgtccaaaatccaggaaagcagtgtcgaacagatcgctacattcctcacttctcctggcctgcaaagaaaccccggcaggaaagccgcattggtcgtcaacatctcggtcgcccttttacatactctgaaagttgctgttaaggagacagacttcgtgcctggcaagctgaatccatctactgataaaattttgcaagagcttctccaaaggtttgtcatagatgctgatcctgttgttcgcacaattggcgttgaagcacttggacggctttgtgatagtgctggaaatgcgtgcaccaatacacaagttaattggcttgttgataccattgtcgagaacagagaacctaacgcaagagctggctgtgctgccgccttaggatgtatccacgcccagattggcggaatggcagctggtttgcacctcaaaacgattgttggtgttttaatgtctttgtgtaatgatcctcaccctgttgtccatttctgggctcttgggggcttggaaagagttgctaactccgctgggctgacattctcgccttttgtgtccggctctttggggatgcttgctcaactttacaacgctgatacccacaacgaggaggcagctgcgttggcgacctccaacatcgaaatgtcatttttgacaccggtcgtgatcagccgatgcgtggactctctcatcaatgttcttgggccggacctgcaagacattgcgaagacccgaaatctcattttaaccctgcttcgccaattccagttggaggaaaactcagcattggtgacggaaagttccagatgtttggaccatttctcaatgtatgcctccagttatgtcgacattgcggcatacgtgaagcgactgcaaaccgagcttcgagcaggcaacaccctcacgcgagatgtggcagttcgtggacttaacaacctcatgaaacgagacgcaccatctgtaatacagacagcgggccagtctttggaagatgacatttggcttgcatttgacgaatcgccgaacaaaaagtcactgaagtcaatgattcaggactggcttcagcagacggctttgacagaaaccgagatgtggatccaacgttgtcagaacatcatgaccaagacacgccacaaggcagaacttacgcctatcacagctgttcaaactacagctgccgataaccccgatgacgaggttgccgggtttgcatcggctgctggggaagggcaaggtgatgctgcgaacggaggcatctccagccaagaattattgaagtggcagacccgcaattttgccatgagctgtctctccgaacttctggctactgtccaggaggcaattcttccagactctgccatcccagcggagttggctctccagaaaaacgtcggagatattgtgagaatggccttttcggcgtctaccgccaatgtcattgagctgcgcgtatggggattaaagatcatagaccaggttcttaagatgttcggcaagacaccggatcctgactttgctgaagcctcgcttctcgaacaatatcaagcccagattgggtctgcacttactcctgcctttgctgccgattcctctgcagagctggcctcggaggctattaatgtgtctgcaactttcattgctacaggaatcgtaacaaatgtcgaccgcatggggagaattttgaggctcttggtgctgggcctggagaacttcgcgaagaatccagaaactactgaaatcggtgatcttaagggtctcaactcaaatgctcgagttatggtaaagctcgctttgttctcggcctgggcccggctccagatcgcaagcatcgaccatgagtacttgacccaggtggttcaaccttatattgcaaaactcacgcctttatggctttcttctcttcaagaatatgctcgattgcgctttgagccagacatttctggtagcttggggacaacgtcgagcggtgacctggatgaggtgtatgcggcgttgaaccgcgaaactttgttgaaggtaagccccgatgtagttgttgtaattcggcaaaagctaataatattatcagttctaccaagacacgtggctatacttggttgatgcgattgctgggctcgtcgagaaagatatcgactttgttttcgatgctttggatggcaaattacagctacccgaggagcctagcggcgttgagggcgaagaggaaaaagaaaaagctcccgagaaggaagaagggaaaggacatgatattaattatcgtgaagagccggtcgcattcttctttgtcttgtttggactggctttcgaatctttggttgatcagggaacttcggcatcgcaacgattggagattcttcaggcgctgaagcgaatcctgaggccggtcatctctggaaacgccatctaccaagatgcaattttcacagagaccatggacagctttggccgtcttgtgttgacagaagctacccccatccagactgtcattgtcgagattgcccaaaacctgtcactagaccaccccgcagcaaagggtgatctggaacgcagcgaccatctttccgatgacattgagcaactcttcgagctcacaagaagcatcattctagttctcgctggaatgcttcccaatctccgggaatcgacaccgctcgcgcggttcaacgtcagttcggatgagtctctgactcttattcgtttagcacttcgctctcttgtcgatgttgcatccgtattcccatccatcattcgcaacgatctccacgcttgtatcctgcatattttcacaactatcctcgcaactggagtttgccaagagtgcgtagttccccaagctcttcccatcttcaggcaattcgttcacggcattacccacacaacagaatcacccgaagaccttgaggtcgtgtcattccagctgcggggatgtctcacgcgcttcctgaccattctcactatcgctcagcgacgagaatcggatatctctattccctgcgccaagaacacgcttctcgccatcactttcctgctgagtgccggggcacacgttatccctccccaggagccagtcttgatccgagttctggatgagttgcttgactgtcttcaagacgttggccttgccaccgtggcagctagctgcatccgttcaattctcgttaaacccggctctcgttccattaccgacgaagtgatcagccgatacctcgtcccgcgactgattgccttcatggttgcctgccctctagacaatggtgatatgcctacggaccccgaaaactcccgcacggtagttgctcgcacgctcgtgtcgtgtatctccaacgccactttctccacttccgaactgcccgccgctacatccctaatcatgtcggcacttttggcacgcgccaagcgtgaaggcgagtccgtacaccaagaatccgcgagccatctccttgagcttgcgaaggccgaccagctcactttccggacgttggtggctaccatgaacacagaccagaagtcactgctagaggaggttcttcgaagtgccggagtcggagctgttgcttcgaagactggtgctgatgcggcagagaatgctccccaggctgtgcctagtatagcattgcgcatggacttttaggaacgttatacggaatcaagacaaacaaaacactttatgatatagttaattggcaaatatttcttatatgccctctcggaagacgaagccctccgaggctccgatcacttctcctccatttctcacttctcccctagcccagacgggcgtagtgtttcatcatcctgggaacccgatattcgagcaatttaaagcgtttgagggaatactcgcatctccactttaaatatctgtaaacttgatgagctcctgcttgcccctggatcataccccctagcccccacctctttcccttcgaacatccctcatgtcaggctccgatcacttctccccttgcccagacgggcgtagtgtttcatcatcctgggaacctgagatttaagcaatttaaagcgtttgagggtatactcgcatctccactttaaatctctgcaaacttgagagatcctgcttgcccctggaccataccccctagcccccacctctttcccctacttatcctcatctcaacagaaccaaggcctgccttcgcactcatgactactaggaggatacttcaaactacacgccatctaccgatctacagccaattcgcccgcccaagcgttacccgcccgaccttctttcgctttcccttcgaacctccctcacgtctcgcaaagtccttatctacatcacatttcaacacaatcaggagtctctcaacatccaccacaatggcctctcgctcaaagcgcgatcccacaatgtattcctttatgaatggggctgatctggtcgaggaacttcttaggtcgaggaacttcttaaggaggatggattcacaacatggggcttcgtgatctttcattgtacgtactataacgactctgactgggagaatttcatggctcgcatggtcggtactgtcttagaagatcttaaggaatatagtgaccttgaatctcttcgataaattcgccctaacgatactagaagaccactcctttaagtgtactacggttaccaccctacgtgagcacttctattagtagaagaagactgtattaaaagaggaacagggcgtaagcgaagactatactctaacgagtggccgataccacttctttatcactgtggactaggaggctatggagtccgttctaaacacccctatgggagggtttgaagaatataaattagggcatatctgtatggttaatgctaaatagaaatggacagatgcgcctgaagaggactctaaggacgaggatatatcagagcctaaggagtttaagccccttaaagggtatactgaggatgatatgggctggatgaatatacgctggcgtattgtgcagcttctgggattctataagatgactgagattgatgactagtaggcgtattatgtccggtatccggagatcgcagacataaattgatatctacccgtgctggaaacagaatttggtatctagcactattaaacagtttcttcaatcgcgtttgggttaaatgagctagtaacatgggcgccgcgctagagcgcggctcagaaggagcgtacggagagatcacgtgacctgaaacacccaacgactaacaattagttgcgtcccagtatagcttaaacaccattccaccatgaaaaaaccagatgacaatggagcgattggggttgccttcaagccataatttcacacaaatacaaaacacatcgcagtccagttccacaggctcagagaagaagtcgccaatggttcagtgaagtttgtgcgaatccaatcttatgtcacagtggagtaaacctataattttgccgttttgaccttgcaaagtcttcaaatatcgctagctaacatacttgaatgtattttctaatatttgtataccactctcgagcagcaatgtttgatttttgaagatggtgggcggtgtgaagccgcagaaagttatgtggtagaactgtatcaggtgaccttcccttcccgtctcagttgtagttcctcgtctacatagacttcaacttcagatcattatatgctggaattcctgttttttttttttttttttttttttttgagaataagtctctgcctgtgaggtagaaatgccgccggatcggggtcgtgcctctaaagcatgcacctcatgcagaaaacaaaagaccagatgctacgagcccggaattcctggacgggcatgtatgcgatgcgaccgacttcaccagagttgctcgctcgtccaaattattgcttctgacgaggaatccgtagcccccgcaccagacacagatgctcggtatcaatcccgcagctcatgtttagtctcaaactgacaagcttctatagtttggaacgtcttgaaaagactgtggctactctgctcgatcggcttggagaaggcccagcaggtactccaggtcatgagtcgagtagacctacccccgtgcggacgagcccgggacctggcgatgcgtacaaggacgcggaatcctccgcggctccgatcatggtcatccgcgatctagcaacggacagcggcatcaaaccaatgtccgatgccagatccctcggggctgtattggacgagcttatttcgcatgatcttgcacttacgcttataacaatgtatgctgcatgaattacttcatcatggcgaattgtcactaaccttttattagtttcctcgatcattacggtcgatgggttctctttgatccgcagtgcgagccaagcgagcttctccgccgagtgaaaaaatcgagcttgctattcagcgcttgttctctgatcgccgtgcggcacacttccgaggaattggctgcaaacttagctccgaagttgtatgaatatgtccggtcccttgcttccaccacccttctagtttccccacagcctatagagttctttcaggccaccctaatcttatctttgtggtcgacaacggtcggacaggtgcctttgagtattgatagctggcttttgagcggtttcgctttacagcactcccattccagcccgctgtttactgctgtcacgactcagtctcatcccccaaacatattggatgaggaaactatggctaattgctatctctggaatcatctctgtcttgctcacatgcattattgtgtcggaaccagccgtcgatccatgctacaaccctggcaaatcgagcgatgtcgtgccatcattgtttcggatcatgcgacaaattttgaagtgcgcatggtggccgagatttatctttactggactgtatatgaacatctcattcaggagtcggttgatttactgaaatcactggcagctttgcaggactggcgacgaaaatgggaatttgtccttggtatgttaatttgacttatatgtttgcgttttcgctaatgggttttgcgatcagagcaaccaaggtctcagtttctctcaatgggctttcacttctctcatctgcttctatatgaacatgctctgaaatccaagtcttcccgaggccgagaaccagttgtgtcagaaatgattcgccattccacggcaatcgtgcaactggccatggatacagtagatgagcgcacgcgccatttgaccgaccacatataccacatgatcacctttgcggcgattgttatctgccgcctactgaatgcctaccaagaacaggttgcctcgactcacaacatcgaggaactcgaatttctcatacgtgacttagtgcagtggatgtactgcattgggttaccatgccatgcggcgcatactttaggaaatatcatcacgaaagtgcaacaaaagctccgaccgcatgtcgagctaccaccagcaaatctgcaaccagacgagctacttggcgaacttaacaattattatttccccgagtttcttggattggggatttcagctaatggggattgggatcttttgtccaatatgggtctctttccggaaagcccatctattccagggagacctgactgagatatcaagccgtttaatatgcgagttagaaaccatataatgcggtaacatagtgacagctcttcaccgacccccataatgcctttcaatccaccggaacagagggaatacagccccagagaatgcaaaggtcaactcgtggcctatatttgcacctttcttgccaatcaaagaagcaataggacccgaataccatgcggttttcatgccaagagcagcaccgaggaacccgaatccgaaagccccgatggcggcccatccgaatggcaaatcagcaatgctgttccaagcatcgaaatcatatccattccatccattccatccatgccggaaaatgaaatgctcttccattaccagagtgatgtggatcacagtccagtacccaatcacactaagcaatgtctgcagagtatccgagaaatacctggctgcacaacaaccaacgactatcgctgcgatgaatccaagagtgaccataatcacacgaggaatgcgcatagcccacggtcctagattctgtgcgtgtagtgcaaaggagtagttgttggggatgttattcttttccaaaaattagcatgcaaatcagaacaccaactggatccataaactcactggaattgagctcaatgccgcaagcaccatcaagaacttcccaaatccccctgccggctccagtgccatcttgagcaaccccccaatcgaagaagccgtatacgcctctttccacgctgtattggttatagtgcctgtatacaaggccgcaccaagagtctgaacaagcacagtaggaacaaagatacccacataggtagcactgaagatctgccagcgcggtgtatccttgggcatgcgcacattataatccgccgcgcaattcacccaggaaaccgagaaggagaatatcaaagccatgtatgtaagaatagcagcagctttgtttgagccctgaagatgaacatggtcctcgctcgtgagctgtgaagcacccgtcccagcagcaacacaccacacaattaaaggtgggatccagatgaatgtgtcaagacgatggatccagttgataccgagtacgcagatgacccagacagccacgcagatcacgatcacgccggcccaaatgggaaaccggccatctgagacggcatgcaggacagctgcgccggagatagagttgattgcgttccaacctgttgtggcgatcatggagaatatgacgacgagcatgttgccccagtagccgaatgagtatcgtctaggattcgggtgtcagttacagagggctacctataggaatacattactcacgagaacgtcgtcatgcgtagtcctgttagtccaaatacggatgtccaggctggtagtaaatcgcttgtgatgttgactaggagaatgacgatgaagcagtcccagaagggaaggccgagagaacctcccaaggagccgatgttgagggtggctacagccatgtttgcactgaacctgttgatagaaaagggatactttagtggtgatcgatattcattcggatatctgtcttaccagaatgtagcagcatgccagaacttggttgtattctgttgtcgctcttcgtcggtgacacgttcgatgccaccttcttcgatggagaatcttccatgaaagaatgattgatgaggcctcactggctctgcttcagactgtgctttctgtatagattcattatagctgttcattttgacgaatggtcgagataaaaagctgaagtgaactgagcaaattgcgactttatgccggggagacactctcctttctatatttccacaatatctccttttttctactcatcttctttccattgatagcacatcagacactgaggtctgcctattagcatccatgattgggcttatctcgcgccatatcgaacacatctcggctannnnnnnnnnnnnnnnnnnnnnnnnnnnnnnnnnnnnnnnnnnnnnnnnnnnnnnnnnnnnnnnnnnnnnnnnnnnnnnnnnnnnnnnnnnnnnnnnnnnnnnnnnnnnnnnnnnnnnnnnnnnnnnnnnnnnnnnnnnnnnnnnnnnnnnnnnnnnnnnnnnnnnnnnnnggctaatccttaccgcccgcggcatcccgcggcatgccggaccgggatgccctaaagaacatggagtataatccacttccctcgatttcgccaaacataaagtcccctacatctgcattacagctcttttcgtcagatcaacttcttcaatcaattgacctgtctacaatggagcagcacacattccgccgccgaggcctcggtctccgcggagtcgacgccgagcgcgtctcgccaggctacgttctatacgcacctctcacctcaaacacagcccacctagtctccacaacaggcaaagaagtgcaccgctggacgctcccccaccgcagcggccgccacgcccgcatcctcgcagacggcaacctcgcctacaacggcgcgcacccagacgcccccaacctctttccaatgtgggcgaagtaccgaggcggcgtaatgatgcaagtgagcccagacggcgaaatcctacggcaatacagcgaccccctggcacaccacgaccagaaccacctcgacgacgggacaatcctgtacacaacccttgagccactcagcagcgccgaagcagcgcgcgtgcaaggcgggatcccagcaaccgaagccccaaacggcatcatctacggtgactgcatcaaactcgtccagccgtggtcaacaagcaacacctcctcctctgcggacttcgacggcagtggcggtaaaacaggtgccaagctgctctggtcgtggcgcgcgattgaccatctcgaccctgctgtctttgctgcccatccgcactatacgcgtgaccactggccgctcatcaatagtgttgcgtttgactcaaatggggatatcattgcttcgtcgcgcaatgcgtcgagcgtgtttgttattagtcgggctacgggtgcggtcaagtggcatcttgctgcgccggttgtcagccagcagcattgcgctcatgagattaacgaggcgggagacatgttgattcttgataatggtgtcttcaggcctgggatttcggtaccgttttcgagggcgattgttgtttctaaggagggggttgtgaagtgggagtataaggatttttcaaccggagggctgggattcttcacgccgtttatggggtctgcgcagaagttgatcggcgggaatgttctgatttgtgaggctgctagtgggcgggttatggaggttactgaagggggtgaggttgtttgggagttcgtcgtgccccagctggggaactataagcaggttatgaagaaagaggagttggaggagatggaggcgattgggtttgattatcttagcaatgcgattttcagggcttataagtatcgtcctgaggaggtgccttgggttaaggaatagcggagattccagggggctgagatttgatatgcgaaatcagatgtgactttctgattgagtctgttgtacatagcagggtaggtggttttttcatgttctataaaaaatatatatatcggcttttgtctaactggtggtgatacaaggtgtgtacagagagagtctgatcaagtggatggatacatgagaactgagacaaaatgaaatagaagaatatgtggctgagggctataagacaatgggaatgaaaagtgtaaactggataacgaaagtaggcgtatcaggcgaggatttacgttcaaggtttcaaccaagtgattcgccgagatgggcttcagcagacggaaagactgtctgaatgccaccatcttggacggctcgagcttcagtagcgatttctttgctggcagccggcttctccgcttgcttggcttgcttgggctcaggcgccttgtgcacggaagcatacttcaagaagacgatgatcatgacttataatcgagttagctatacgaaagagccaactaggaacaatggggcacttacaagcacagatggcaatcgtcgaagcagcgcgtctagtcaaaatccatcgaagaccttcaatctcactctttccatcgctgttaagcgacacggtgatcttgtagttcaattcctgaaccgaggtgtcgatggtccgctgcggttctcgcgtggacatcttgtggtcattgaacatgcccttgatgtcgtctttcatgcctgaaagttcctggctgagacgctgcgagataatatccgtttcatgctgcaattgcgtgcgcgaggagcgctggtgctgtatttccgagttgcgagctgtctggagcgatgactgaagctcggagcaggctgctttgaacaggtattcttcattttcgacatcagatttcgaagtaaggctcgccctagccaaagagaggttgttctgcaggatagcccgcacagccttcatgattgtagtagactgttcttcgctgtagccacctttggacagatcctgtaccaatgaatatgtgtcgaaagggtgaacatacggtgctgcagacaaatgcggcgggcgatcgtcggacgaggagggttccccggttggggttagaaacaccgacggcgagggcatgtggaggacatcctcaaacggagtttggtttgtggatgaagaggtatctgtactttcttccgatggggcttcggaagcgggggacgaagaggccgaagcctgttcctgttcggcgccgtctatatctttggcctgctcctcgcgcggttcccggtccgtcggagggttgtcttccttgtcttccttgtcttcctttgtttcagcttcggttggttggtctgcgttccgttggtctgcggtcggggtttccgaagaagtgacatctgcattgttttgctcggcttcctggggcggcggttccgactgtgactcgtctggtggagcttgcccctggtcggaggcatttacaccatcatgtccagctgatggatcgcccggcacctcctgatcgtgtggacccttcttcggacgcaacgaatgagcagtattcggttcgacggcaggaccatatcgccgctggtaggaagcacgctcctgttgctgactcgtatggaagcgttggttaagccggtatggaattctaattgaacggtatgttctcggttcgcatgatcgcaccgcgcgcataaaattcggatacaggaacgggagcctgggtgtggccatggtggtaaccagcatatgaagaagctaaagtcttttccgcggggaataatcaacgtcactccgtctccgggcggtgatgtatggttagtcagctatacccgtccgcgggtcgggagcttccttagctgagctatccgacctcggaaggatctgattggttgccggtacctgctgtggttactattaatatgtacggagtacagcttgcctatatataggttcctacaactattctagcgaaaggaacaggcctgataaaacgtgtatagcctgccggggataaatttcgacggactagcccttttgcaatcatcttatcccaacgccaaagccaataaatgagggtatgtagtaggataatggtctgggttttcttatactcagtatatgacgagaatagtagcagtgtgttctactatcattacttgacagtctacatagatataatttaaaggatgtaactagatattgggactggtggccgattttgggcattccagagagagatctactcggtcctattacgatccgcatgattgtctatcatcaatacgactaggtacgcagacatagccctggtccaaccgaccacttacatgcaaccgctaacctaattaggcatctggatctagataatataaaaaaagagtatgcatatatgtgtaaaagcgcaactaggtatatatatgtatagtcattgtcggcagatagagtacaattcttcttgcagagatctctgtgaaacccttttgtttgctgcatatgagcagccgtttgttgtagcatctatgaaggctacccactcagccgcatcggaatactgcagctttcttctctctactatctctgatttgatcaaatttcagacccagcatggccgaccttattccaatcatttcacaaatagcttattgaccatctgacagaccataataaagatccatagtatctctatctaggagaagaatatacgagtaattgaatagagggagtaatatgaagtttggacctcacgtcaacagacttagacatcagacagctctgtaaagtcatatgtctgtttgcaatacaaggatgttgccctttatgtttccatttatggatgtttgtgtttgtttgggacaaacaacgtttagggaaagagcgactaatgaagaggcatctccaattcgggaaggcacgcgtctggtcatttgacccccaatctctcctcttccacttctctctctcctctatcgacttgtttacctcttcggtccacctcgatcttggtcccttcaagctatcaattgagacggagacgaacccattgtcttgtcttggcctggctttctaaaccataccatttcctgtcctaatataaatcacattaaaatcccccaaaaaaagaaacatccttcgccaggcgtcaggcgcgtctattaatccccatctgtgtcgaccaacttctcggcccataaacaacaagcattgagccttatcacaccacaatggcgtctgtacagactccgtggacctcaattctgcttcaggaaaagcctggtctacatgaatacaatcatgccctgtcgaatgtcgaaaaatactacactcgcttgcagcgagctatgcaagatgaatccatccatgatcaactagttctcaaccccgaccaaacacactcacgtctgctgaaatcctttgaaatcttgcgaaccaagcaactgcccggccctgtcgccgaagagatcttcaagaccatggtacttccattcattcacgacaacatcttctcgccgccgcagatgattcaactcgttggatctgcactacctcttataacaaaacaacattctcaattcctgcgagacctcgcaagcactctcctctcttcacaaggcttgttcgatcacctggtggccaacgaaaattacacagtgattctgaaggaatggctgttctcgaaaagaacccgtctttcccttgctctctctacgcaggttggagacaggttggttgcaatgtgcaatgcctgttccgctgatcatggaacggaggctactgtagagagttgggggattgctcaagaactgatggaatccatcaatgcgctcattgactcgtcttacgaagaagaactgaaacgggcaaaagtggaaaatctacctcctctggaatcaatgaaagttctcagtcgggacgataaaaagtcaaccctagttcaacaaggccccaagaaggaattgaaaaaggaattcacggtctcggacgaaatcctgcagcagatggaccacttcaacatcctaccaccattgtccgctcgaggcctcacccatgcagtggaacatcttcaaaatgagattatcccagcactgatgcgctctgccttggaaagcttcccatgcagaatctgtttggataggctcactaccgggagccttacaggtactctagccaattcgacagacctgccttcagatcgaactacagcaccgggcaatgcccaagatattttcggcaagagagtcggcctttggaaggttttgctgtccgacatcgctttcaagaatataaagaaattggttcacggaggtaagtttgatttctttcagtatgtgcaacttgatcgtttctaaccgcatctaggcgaatttggcggggtggaacaaaagctcagagatttggcaagcggcgaatggaaaggcaaagatctatctcatcgtgtgggatctaaacagcagaagaaaagaatgcaagttcctattttggaagtaagcgcttctgcaactgtgtcaatgttgtggcaggttgatgttggtttttacgatgagcttccatgggtacagcagcagattgtcaaaggtaaataactacctcatcgagacttccggatatatgctaactttggcagtgtggcaaattgtgacctcggaagaggaggtatgttctaaacccaagcatcatgagaagtctgctaattaggtttcacagttggaaactgccattgagcatatacttttgatccaggaaacctacacctctgaacttgttaaactctgtttagaacgtcctattcaacaatctgatggaacttggacgccacagcggttcggaaacgtgaaagagactgggtcttatcggatgaaatccattgcttcttccaaggcaagcccagctttgattgagatgtcaagtatggggttacccccgtcagtcccattgaaagctggattgtaggctaaccatgagtttccaagacaaattttacaatctcactgagccgtttttgaagtcgatcgttgatgagaatgacacagaggagtttccgttcgatctctcacccgaagaattagaaattgtgaaacacttcagcacatcaaccttgattctaggacgaagtggtacaggaaaaaccacctgtctgctgttcaagatgcttgccaagcataaagcaagacagtcagcgtcggatgggcagcaagcccgacaggtatgtctttgtctcctcacaatgtcagatgagaaactaacatgaatagcttctcttgactcgctcctcttatttggcttcaaagcttcaaacatatgccaaaagtctgatagacgctcaatccaaggctccatcgactgaagaggatgtagactcagatctaagaccgacctccttcttcgccctgaagaattggcactttccagttgtctgcacttacgacgagtttcttgggcttctagaaaacacaatcaggtttgaacatctaatgccaaacttttcaacattttcccactaactgaagtagaatggcggatcgaaaagacttcttaagagacatcaaccccaataagacaaagggcctagaagtacaagggggagacaagccacgaattattgacttcagtattttcaaaacagaatattggggctctcttagtggattagccccaccatcttgctctccagagcttctcttcgcagagatcatgggcgttattaaaggctccaccgtcacggcaaaaagcctaaagccgttatatcgtgcggaatatgtcaagaagaatgccaaagcttctcccgcttttacctctgaggcagagcgtgagaaggtatttggagcttttgagcgctatgaaaagcaaaaaaagcttcgcaaggagattgacgagttggaccgtgtcggtaccttactgaagtctctgagagataacaaagctctagcagagcagatccaacgctgcttcgaggagatttatgttgatggtgagtctagttctcaacattcgagagcaaagtactaactatgtgtttaagaaattcaagacttacgttgtctggacattgtcttacttttgggttgccttagtgacgcccgtgggattcaccttggtaaggtctcctgaaattcatttacgagcttaatcgactaatataacatagctggtgataccgcccagtgcatctcaaaggactcggttttccggtttcctgagataaaggcttttttctatgaacattacgagatcattgccaacgaactaaatcagccctcatttgccaagcccgttcaattctctctggctaaaaactatcgctcgcatcagggcattctgagttttgcatcatgggtgatgcagctactctggcatggtatgaaagactgcaatgatcagacttgtttctatctaacggtttatgtataggattcccggaaacaattgacaaacttgacccagagattggctacattggcggaccgaagccaattatctttggtatgtcgtatcgcatcgcttcattggcactcaatcactaacaattgtcgcatagcgggatttgactcctccattctttctgccaaaatgattggtctggtcaagcttaatgacaaggtcgccgacttcggcgccgagcaagtcatccttgtccgagacgatgcatcaaaggacaaattacaaacccaaattggcgagattgcccttgttttgacaatcctagaaagcaagggtatggagtttgatgatgttttggtgtatgacttcttcggcagcagtggacttggcagtagctaccggtgcctttacatgcttgtccaagcatcacgagcgcagtttgattctcaaaaacatgcggtgggtatattccatgagataatcagcccgttatgattgctaacattttcaaccaggctttgtgctccgaacttaaggtatatctatctctttgctaacaatagttcttgctaacaatattaaccagtcgctttatgttgctgtcactcgagccagaaagcaactttggttcatggaaacccaagagaacagcgttgatcctattgtgcaaacactctcacagagcaacagcctcaagctcgctgaaattgtgaagcagaaagaccccaatgtaagtgatattctaattaaaatggcttgcatactaatctctttcaggttgcggaaaaggtcatggttctgcgagccggtggctcagtggacccagagaggtggcttaagagagcagcacattttctccatcagaagagctttgcagaggtaatatactgctcactggctagaggagagcttcatgctaataaaagttgaacaggcattgttcagctacaagaaagccaataattctcgaggaataacacactcgcaggcctgtttgtatgagcaagaaggaagatcccaccgagcagcgggagataccgaagaatttaccgtatgctatgagaaagcaatcgctcttttccttgaggttggtcttattacagaagcggcgatgtgctacgagggacttggacagttcggcaaagttgcaggtttgtttttcaatcgtcaggtctgagaaatactaaccccctttctagaaatctggaaggagcgtgaacaatatcaaaaggctgcatctttctatgagaaaggcaattttttcaccgaagcttcggagtgttatcatgcttgtggccagtacgaggcggcaatcgaggtcttgcgccgcggagaccaatttgatgaactcgtcgcctatgccaacaggtttttacaccgaattctctctgcaatgattacacaatattaactctatatagaaaccgcgagtatcttagcgagcctacattggttcgttattcgagactttgcaatatcttgctgaagcagggacgtgtctctgccagtctgagggcaataaccatcaatatgcttggatcagatgtgtccaaaattgcctttttcaaagagtttgaaatgtggaaccaactgtgtacactctattcatcaaagtccagatggtttgagtattatgatctatcagtggctgttggtgacattcctgcggcgataagcacattactggttcacaaattgataccagtagtcgacaagccagttgttgaaaagctgtttagctattccatggttgaagtcttgtacgcccacagggacttaattccgagcaagcctgagcgagatgggctgctgaaatcagcaaagtcaacttatctcgaaaagcttggggcacagtggaaatcgctattgctgttggtcgacgattttgaggatgtggatttacccgcgtcagttaaaaccctagataagggtcttgtgaaggatatcttctgtctttttgtttgttttcaaccgagccatcatctgtgggtagtgcactaattattttcaggtgattgctttcgagccgtcaatattcaccaagcaaaagaccgaacatcttccgatggagattgtcatccgggttggaaaactgctgcaagaccttcatgctcagaaccagtactccattaagtgcctggctatggcttgtggtatttttaccaatccaaaacaagagagccatacgatcttgctccactggtctccattgaggacttacacagcaacgcctcttgatggttcttcattccagaacttgattgacattgcaaaaaacttcattcaagagaagtttaccgcagcacttgctcagttccatgaaaatgcactcagtctcacgaagagggattttctgccgacatgtgtccatcatctctacaaaggtaagctatatccgttgacgctctcttagggaaatatctaacgagttgaatcaggattctgtccaaagtttaagaccaatgaatgctcctggaagcatgagaagcccactgcagaattcgccattgctaagttgaatgtaagtaaaacaccaagaattaataattgaccaactaacacctagttaactcccgcagtgtcttctcgctattgctgaggtttttgcgcgcctcacgcctgtttattaccaaagagtcatgggcaaggctttcaacaaaccatttttgggtcgtagtaagtggtcggtccaatctcgctgtacgtttcagatctgacatactatagggagaatctggattcaacagatccaagaggagcttgtgattgtcagttcactggagcaatcttctattgcaattacaaatctgcgtttcaacttgcagagcaacccagagtttgctgcgaccgcatactgcctagaagacttgctgttctatcgcatgaacactgaatggggctcgatgaacagtctgagctcttctctagagaaggtccaagaagctcaaattctcggtatggtgaacttcttgttctgaaacatcataaatcggctctaataaccaatttaaacctgcaggccctcacccagccacgcgttttcagcgagcacttattctgaatatggatcgcatcatgccaccacgccctagacgatccggccacccgctcgcgttacctttgacaacgttgaatgctgctgagagaattcggtcagcggttggaagacgccacggtcaagattttgtgagagatgagtctacattacgtatcggactacactaacctttgtatagcacaacggcatcaacacctttatccaatgcctcgagaagacacctaaatcttcccttggctcgctccatgctgttctgtctgtgttcgagtttgcagctacgtatattgtgtgtttccaagtctcgttgatggtataacaggttactaacattgcacagctttacatcgccaatccagggaagggtatcgtgattccttggtcctgggctttgcagcatctttcaacaattatgcaatctcccgttaaagactatctgttcaaggacagagagatccgagtgcacataaccgacttgatgcaccttgtcatcagcttctgcaaccttatggagcaagtcgaaaatgccttcaccagcggtgctctgaagttccaaggactgggccgcaccagcctcccaatccctattgtcaaacggcgctgcaccgagcttttgaccaccgtgaatctcaacctaaatcactggcccaaacagccaattggctttaaggatatggagaaggtggtcaacaaggtatgtgtctttgcttatgacaatgtccctaaaacaagcttgactaaaacaaactagacacttcgatcaacccttattcctccgggaatggcgctagaattttctaacagtgataaattccggcaaagttgcatccgcgagtttgcagcctacaaccgcaaagatgagctgtgtgtcattgcgcttgacgatagaaagtccgctcctctcttcttgcgatctttcacacaaggaaacgtgaaatttatccagctcagtgatatcttgaaaatatcgcgcattaccgagaaccaattatccatgggtctggaagaagactggcaagttgacgaatataccggctacgagctcgatatgatcacgaaccttcagcgacgttggcgacaagtgatggaggtcatcgagaacaaccgccatagggcacaatctcgcgagggcaaacttatccagcacttccatgaggtgtgcacgagacggatgagcgttctacctgcggccgcttggtcaacccgagataaaatacacatgcgcaaggtcatattcaccgaaggcataaagatcgccatgtctcttgatggtgttttggacagtttccgacaactgaatgaccggtggaggcaacaattccacagcaatttgtccaccgcaaagctagaggagctctccgttattcgcggacgtgttctgccaatcgatgggcaacttgagtacatcgttgagcactggtctcttaagggcattgaggaaggtatgatgaccgttccggcggaggacctcggtgtctcagcccgtgaggcccagcgcgctctctgggctgttcagcgcgagattgaaatcattaaatctcaagttgagatcattgcgaagagccctgaccggtaagggggtttcttcccttccatgattgttcagcagaggctcgataaccgaaatcggcaaaaaaaattgaaaacgaaaaccgtcagcaaaaaaaaagctagttagccggggagatctgtgtggaacgaggagaatttcttaatatctggctccaaccatcttatggctggacgagacacgagacacgattgtatgaagtgaaatgtatgatatcttgtttgattactctgtaatggattttgtctgcgtactatgtaatcggtgtactttctaacagaaaagttacattcaagtacagtatatatcctttgcttgttgtattatataatgtaaagcatagacgggcatttggcaaaatacagcatccttctagataaccactcactgtcttgccaagaggccaaacagcagctccgtccgagtccaatactcagccgcaagcttcttgatagtcttaacagtctccgcactagaaccagcgctcttctgagcacgctcgacgacaccagccagctgatttcgctcgccgagcatctgagacagatacagagcgtcgaagaagagctgcaccctccagtcgcgcaggcccgcgacttgatctggatctgggctttggatctctgatttctccgccgatttatcttccttctgcttatcttcattggcagtggggtggacgtccttggtctcagccttgctaggggtattttcgctgtcgagatcatccaaggcagatgcgatagccgcctcgagtttcgttttcaattcttgcttcaacgcctgcacggtggacggatcccataggtctaatccgcacgtatccatcgaggaagtgagacggcgcaggagcttgaagctcgaaaccgagggctgaacaggtatggcaggctcgccttcccagagtgatcggccaggcacggtcttgatcttgcctgtctgggggtttgactttggggatgggatcaagctcagcgagccggccttgctgactacttcggttgcaagcagcttctgtaggtcagggacgatttcgctcgagaagacaaagtctccagatacaaagccagcggggatatctcgccggacgagtcgtataagccttagtaggaaggtggctttttcgctggaatacgaggagttgaatgacttgaaagcgctgctgaatgatgtttggagactgctgaatgcgtcccgaacggcagaatgcagagaatcggataggtgtagggggtcatcttcgttgagtcggggtgttatgtcgatatcttcatcttccacttcacctccaacgagaatgtcagtccatcgtatacggcgtagagagtcgatagattcgttgactgcttcgattgatgctagccatgcttgatacttcataaggacggtagagacgtcttcgtcacggcccaataatctgtctactacggttcgtttgaatgcctgtgcgccgttcgtgtattctgcggtaatgagatcggaatcccacagagatccaacggagttgtgttcggtattctcccattctgatatcatgtatgaaacttgagcaccgacttcgcctaggctttgtgcttgcgtattcaggattctggcaagctggttattgaagacatttcgaagactttcgaggacattcacagagccgtgaatgatcgttgagccccaggacgatagccacagttccacagtctctgtgcggagcgagagaagctcagagaaatcggtgctgtggaccaagctcttttggcagccgtcggagaatttattgaaagcttggagtgaccattccttgattgattccacaccctgggttctgcttagttcgctgagcttgatccagggggtgaaattcttcacatctggagctacccagcggccaagaacttcgacctcgaggccatctagactctgaatctctgggtcggagaggaggggcctagctttaagtttcatgagcacatccgagaatcgatgcgatcgcaagacctttgaagcctgaagtgttcggacgaacagctggagggctctagggatgttctcacgagatacatccaactggttaacaatgatgcccaggcgcactcggtgaaagcgatggatcgcatcatcggaagaagggctctctacaaggcaataggcggccaatgattcaatgatagtgtcttccgtagcgcttgtagaggcaaggcgtttatcaatccgtttgataagtgtctgccggagggacgctagctggttccagagatcatcgaggaatggagggactgattcatgttttgataatgtcttgtgcagtaaccgcgagacaactagaatcttcgcaatcagcaggagcgagccgcgacgtcgcaaaagccggctgatagaggttgtacagcggtggaggagagaaagctgcgctccgaatgcgtgcttctctgcgtctatatccacattatcagctactagttcctgatttccgccagaactaggttcgtacctttctcatcatcgccagtttctatttgccggacatgaacatgcttcctttctataagccgggggttgcaccggcgtccaacatcggccagaatggattccacgccttgaatgtctcggttcatagccacaatcgtctcagccgtgccaactaagtcacgatatcgtgtcctataatcggataatatacacattagcgaagaaacagcccctatggcaaatcaatcacataccccacgagagctcggagcttctccttattgctcgcgatgtcccgacgcagctcctgttccacgcggcggacagtgggaatggggtattggaacgcatcgtgccatgatttcaagcttgaaggatcaggcgcctcaggggccatgctggcgggatatgtggtgagaccgttggttcatagagaacaagtaatccatgcgacaacggatgcctgacagccttagactcctggctagctcggtcttatcgttatcggcacgtgatggcagaaaaagtcccccgccaccgaggggaaatccgtcatcgttggacggaccgttttataccttacacaacttatattcaatatgccgttgatcgaatcagacgctgctgtggcagagacatcatccaccgatctccctgatcgcctccctttccctcccacgacatactcccatatcttgcattgctcttatcatgactggcatccgcggtaagcttccatatgactcaacaccaaacatatctgaccgaagtcctaggtaccgcacacttgccccaaagtcgcgcgtcattcctttgactgctccttttgttgaatacctccgcgccgacggcattgttcttccgcccgaggccgttgccccaaccgacgatgataacctggacacattctccgattcgggcgaggaggagcacgatccatctacagcatggcaagagattcacactaggatcaaggataccatctctgaactcggtggcatcgtcactccgaaattaaactggagtgctcccaaagatgcaacattcatggccgccacaaacgacacccaatgccgttctccgaatgacatctacctcctcttgaaaagcagtgacttcatcacccatgatttggatcatccctttgacgactgcgtgccggatacaaccagcgacgaaccgacgccatccaccgttgactcaccgctgccggatgtgccgtattctctggtactccgtaaatatgtcaacttcaacccttcgctcgagttccgttgttttgtgcgcaaccgtgtcctgctgtgcataacccagcgcgatcagaaccacttcgacttcctcttccccatgcgtgatatgctccggtctcggatccagtcattcttcgatgacaagctcaaagacacattccccgaatccaactttgttttcgacgtgtatatccccgctccgcaccagcgcgtctggttgattgatatcaacccgtgggcgcagcgtaccgaccctttgctgtacagttggttggagattctccggatgaaggatccgattggtgtgcaggaggaagaagacgatggagcggaagagtatgtgagaatctcactttctgatggtaagagcatctctaccggtacggcggaggagctcgaaagagaagattattcgggttcttccgcctcggaagatgagcacgagggcgccgaaggagatgatgaacaggcccccttcctcccggaattccgtctcatcaaaaaagatgatcccgaagcttatgcattcagctccactcagtattcggctcacaaggtgccgaaggagctggtcgatgcttcgcttcaggggcctggcggcatgagtgaattcatgggccagtggcaggatatcttaaagaagcaggagcaagaggaccaggctactggcagtgactctgaataaacaacttcggctcaaaacgctgcgtggtataaaagcatgcattcttggtttagtggcgtttacctatagcagggaaattaatactgtggattcgaaggttttgtcgtggactacaggtcaatccacacattatcaataaatgaaatcaatatatgaaatcaatatataattgtcgccattggtcaattacctacatagaatgtgtaagagaaggttatatgctatgtcatatcaacaactccagtattgtgtgtattacttctatccttcgtcttgaagaacaaaatatgtatcgtcctgtatcattatatcgaaaaatgaccccgagcaagtaggagatacagccgcaagctctagtagctatatacaaaaaacctatcaagcaactaaagcttatgccttttctcaccagacgccaacctccggaactcttcctgcgggaatcccttcataaagcgctcaaggcccataaacgcctcaagaccattctggcgatccaaaagctccctctcaggccgccttaccagctccttaatcttcaacagactagtctggttcaagtgcgtaccaagacgatcatcaacctcctcaagcaccttcttcaagaacccatcagagtcatccttctccccggactccggcgcaataaccttattgacaaagccagccgaaaccagctcgtcacaggtgatccgcttgctcattaggagcgcctcattcgccttggcgatgcccaggcgctcaacgaaggcgcggctagcaccgccttcggcgacgagaccgagcgaggagaagggtgtcaggatgaatgtgtgtggggcagcgtagatgaagtctgcgtgggcgaccagtgcggctgagagaccgacagcagggccgttcaaggcgacgacgagaatcttggagtggttgtagaaggtgcgagtgacgtcgacgttgtttgcgacgaagcccttgactagctcgcggcgctcgtttgagttactatcgtcggggcctggacgtatacttgtgacgtcggctccgctgtagagaggagattagtgttagatatagttgatcttgtcaagctttcttttgggatgtggtttcgcgatatctagggctggattggggctgttgatgacatacgctgagaagaaacgaccctttccggtcaggactgtaatgaagatatcatctcgtgagtcaatctcgcgtaaacgctcgcctagaaggtagtataggtcggcattgagagcgtttagcttgtcgggccggttgagtgtcacgatcgccacgcgagcctggtaggcaacggtaatgaaactatcgtttgacattcttactgtatattgtagaaggaaaccgttcaatgggtcaccaaattgaactgtgattgcaatggtctatcatttatcagtcgtctctatgggatatcagggcacgcgaatttgcggggagccgaggcccgcgggaacttactttgttctgcctgagtcagcagaaataagcatgtatgttctgtttgtcctgtttgtcctgtttgatcaaatccaataatcacgcccgtgactggtccggccatggcaccactcggcgattaaagattgaagatcaccaacctacacaatatcgctgccccggtctgctggaatcaggcggtataatcaactgagcacatcctaccaacaacatcgaacctcaaaccccactcttagcaaacccgaagccaaaacacgccgagaaaaaaaaagcaacgcatcagactcatacaatgtcgcaaatattccgcaagttgcagggaggcaacctcgaagtcttcaaggtgcgtatctgacactcaagtcctctgagcgattattcccacctaccgcctcccaccgcctcttcttaggactaaccgagtccatgtagtttgggatgtacgtcctcttcccgatcggctggatgtactatttcggtaccaacctcgacgaccgcttcgccacgaagaacttctggcccactgccgatcaatcgcacaagatcccgctagacaaggacgagattgaccaggaattggcacgtatgcgcatggtggatgccgtgaagcgggagcagagacgggcggcggaggcacaggctcaagcgcaattagaggcacaggcacaggcacagacgatgcagactcagcaatgaggctgcaattagtgggtgtgattgagaggagctggcgacgggggctgaaacacaacatgcgctcattgcccaagtccccgggggagaaaatggcattgcgaaagggccactggtgttccctttggcgggttgatatttgccggggacaacattggcatcgcgctgggaagttacacatgtgctgatgatgggtttacttgtacaacactctgctctgggcatcgagggcgttctggagttttcgtcttatatgtatgttgcgttttcaacatattgctttctactatttacatctgcatttgctgtacatcattctggaaaagtgtgcaaaaaatatcaacttcaatcatggccacgttgcaacgataatacaagctggcatcatcgaccacagaactctgccaaggaggcatatctatatacagtgtggtgtgaatgacccaagaaaagaatgtaataattaataataatgtaatccgccgcactccgacaatgcaagtcataggggtgccgccagttcccagaacacaagaactccaaacaagcgccggccgacaggaagagtgataacgaggttcccttcgatatcgatatgcaactccaaagggattagggctcctcacttttgacaatagagaatgcaactgcaaccattatgcgggttttattcaaaggtcagccaagcgctcggtcgaggtggcagcagcgttctttgccgtctcgtacatcaaatccccgatttgcgtggccacgccattttcgccaaagaccgaactgattgacaaccgaccggagctgaacaggcgctcgccggcccagtagtagtaaaggcgcccgtaaatggcgagaaggtggtcgggaaggtaaatgtaagtgcccatggctatcatggcaatgaggccaaggagcagcgtgtctaaataggaaacgaaaggtcagcatggtgtaccaagagtattgtgaacggggaacaggcgcaacatactgaagatgagcttctcgatcggagtaagcatgtagagggagaaggtcacctcatactggtagatcttcaaccgcatccagcggaagaggctagccacggcccagataatgaagtccaccattcttgcggggtattcagagaattgtaggatgctccagtctttcgttgcttcttgcggcttctggtgccgttcgtttgaatttttttttctctctatagtctgagcaagagccaccaatgacaaactcgggaaatagacccggagacagtcgtatcagacacgggcaatatgtatgcccggctggagtgtggtgttgtgcagggaaaaatgatccacgatgttctaaatcaacgcggcgcggggaagggttgacgtaaggtcgcaagataccgtaggtacttaggcaattgagggatattcgttacaatcgggaagagcgtgttgacagagacgttggggttgataggagtaaggaagagaggataagactgaggtcacgctttttggtggactgtgctcaataagattccccttaaaatacttctgttttggttctgaaaatggctgtatattttgtttatttcatgccgttttggtctgagatatatggtaatatcagtatgcactagtaatagcataaacctcggctggtcgtctttagtatgtctacagcactctaatttttagaggtttttattcaatgttctaatttcattctttctcgggttagataggtgtaatttatgtagtacatatgtatagatacctgtaatgtagtgataaaggggaaggtgggagaaatcagagtgaagtaaagtaaatttcaggcattaacttgctctttgcggaggcctaaggccaccaaccctattgcctgatcatttgtgttttccgtgttttgccgtgacaatttgtatccagtacacaactctgacgctattccacacgcgagtctcaagtactcgatactttatgttttatgcacaatctgtacaatttagatgtcccgacattggatggcataattctctatgcatagcatatgatttatgtacacatctgtctgtaactaacctatgtattctaagcattactttggcaacaatattgagcataacaaactagatgtactactagctaacagtctcatgtccttttgctaatcaggatgatttgcccatacataagggcatggtccatggataactaagtgttctactattcagacttcctagatctcatttatccagtcacagtgaggaaagcttataatactcactaccatactactaaacaacaaaaacagaaatatatccaatagactagaaagagaacctccatttatctagaataccaagatcatagcccttgagtcaaccagcaaacaacccaaagtagccaaaaaaattaccattcaagcttatcttatcgcaaacgtcggcaataacctcaaccttgaacaaaccacagcacgaacaccaaacgcaatgctatctcgcctacgctggcggacattgtccccaacactagcagccccggcgcgactcttcagccaaacccccatcatccccgagaaagccctccccccacggctcaagatcaacgatgccgacatatcaatatcctacctaaaaggcaccgggcctggcggacagaagattgtacgttttaattcccaagcagattcctagataagaaccagaactaacaaaacctagaacaaaaccaactcagccgtccagatcatccacaagcccagtggggtggtaatcaaatgccaagcaacgcgctcacaggctcagaacgcgaagattgcgcgctcgctgctcgctgatagagtcgaggcgctgcagaaaggggattctagtcgggttgcgatcaaggctgcggcggcgaagaagaagaaggctagtaaaatgaagaagacgaggaggaagtatcgggaacttgcggagggagagaaggagggggaagtcggtgaggaggaagaggacgaggttgagataatatgggatgatgaggtaaaggagggagaaaataaggaggctgaatcgaaaattggaggtgaggccaaaacttccgaagagtctggaaagggtgtgtgatgtgagatttatgctgttatgtgttttgggatgtatactaggtctactgcattggtgtttgagcgtttacttttgagagatttacattcccgtggatgttcttctaatggaaaatcaaacaaacatttatttcatggatctagtgtctcatcgcaacatgcatatggtaatagggggagtggggaaaaggattattcctccgaaggagaaagcaaatccatataggttgaactttttgagttggaagggaagatcatagcaaagccactaagaaatgtaacttgccagcacggtctttgactggtcgtcaagacgctcttgggcgaattgcgaaatacggccactctgcttgctatcggcttctttcaagtacgagcccacccaagccttgaggtcagcaccagtttcgggccatgggtccttctgctggacacggatggtgttcagaggagtaaatccaacaccgaaggacatgtcttcgatatctgcatcattaatgagatcatccctggctgcaggcagcggcggaagctcgaggagcttgagcaatgccgtgcaggtgaagccccatcccttctggctatagcgagtggcaaaggcctgcgagttggcaagggtcttggtgaaggagatgatagctgtcttgcgatccaaaggccgggcaagcttctgggtttcaggaagaatgacgttgatatagatgggagtgaagagtctagacattaattagcctacgaccaatttatactgtgtaagaatacatacccctcttgcaccttgtcggtgacttggatgataaagtccgcgctgtagcccttgttatcctgcgccgagaggaagtggaagaagcggacaaagcgaagagtcaggttctctgtcttggaattctgcagacgttgaagaatgatctgcataatcatgacaaagtagttctcaagggcagttctaggggaagggaagtcaggtaaccaccaattaagcgcttggaagatgtgatacgtacggtgggaagttagcaacaactgtctccaggagatcaaagccaaagctctcattggccttggtagaaactagtttttggaagataccaaggatgggctcgatctggttgtgttcaatgatgaactgcgaaccacgcggaatgatcgaggaaagtagccggaccaaggcggggatgtttcccttcgaatcccacataacaggcatcaggatagggccaataagctcttggtagtaggtgggaagggtgccggatgggttggcctcgagcagcgcagcgaagagctggaaaacgtagggcatgaattctgaaatttgtcagcaagggatcaaagatatcgacttagtttgatttagctcaccctgcacatcattctgaaggatagctgcgaagggcgcatacagcgcttgctcgagcttgtcaggattcgcaggagcagcaaagctatatcacgttagcttctagcacttggaaacgaaaaatgcgggaacataccggatgaaggcgcccatggcttcgaagtggaagtagtaaaatcgggggttacttgggttcgcgctgatgatattggtaatattaatgaagcgctggaggacgacgtccgtgaaaggcaccacgccctccttgatgacaaccaaaacccgcatcacacaacgcatcaagaactcattctcttgcactttttcaggagctggatcactctgaatcagctggaagatgtgctcgagaagatccttagcaagcggtgtgatctcagtgggtggaatgactgcctgtccttggctgtcggtgaggaaaagtactcgctccaaggcaatggcagcgtaggtatagacgacaaagttcgacgacgccaggtgcttcaccagcacaggtagaacctgctgccactgttccttggtgatgatactgcggaaagtgtacaaatacttgatagcgtcgaccttcaggatagggtgaacaccatcctcgttgatcagatccgcggcgaggttctgctggaagtaatccgtgatactgaccaactggttggtggcagtgacaccgtgcgaggaggtcgcagtgcccttggcagcgatagcggagtaaaggtacgtcgctgtgtccttggccttccagttggatgaatccttggcatactctgccaggtagtgctgggtatacttgaggacaacctgggtcactggctcttcgaatttctctgccagcttgcggaggaaatcagtggcagctcggcgtctggtctcgctatctgacccttccaagtcccgtcgaatgaactcaatcggctcgtcctcgaagagttcttcgtcggactcacggaggctcacattcggcaaaatgaccttttcaacaatctggctcaaggtttcctcggcctggaaagaagcggcatgctcgggcatacctgcgacagaggtcaagaagtgcagtgctcggctgaccaaaatatcatacttggtctcctggccgatggtggtgaggaagttccatgagctcccaatgaattgtccaacgtgaggctggaacacatccatgtacttctgcacgtagagagtcaaagcctcaaatattccagcgcgaacatattctaatagaccagcctccgtatcgtcgtcggtatggagtaattgattgtcgtaggtcaagtatttgaggaagattgtcgagattccggtgaggttgtcttcgaacatgggagggagatcgtgggaggaaaggtcataaaacagcttgaccatcaggttgagctgagtaaacccttgagtcagattctctttgttggtcttgttctgctcaagatagttatccagtgcctgaggtgtgttagcattcggcccaccgaagcaaaactgggtagagatccgaagatacctcgaacagggccaggaacggagtaccgaacttgttaagaacgtggttaatttcagtgtagagcgcatcagactggaacaaaggtctccatctcttgaaaatagagtgtgcgacttgcaacacaccaatgttgacggtggggttgtctggtgacagcttcgagacgaggtcctggagaaaacaaatcgtcagaactaacattacaatgctttgttgaatcgcaaattacatcaaccagagtatcccaccgctcccagaagtcactgtcggcgatcacactaacggcctcacccagctggctctgaattcctggcggaaccgagatcatcaaggagatcagctcacgcttgagagtggtgacttcatcctgctgcagcttgtaatttccatcttcgtccgtccagttgcgcttgataaagttcttgaagcatagagcactagcgagacgtgtgttgtagggtgtggtgtccgatgcggtgatgtgaagaagctgtagcgagaacccgggcttctgttcttcctgacgcaaagtaatctcggctagaagaacaggaatcacatcagtcaatactgcttcaagtaatagaggggtcaaatataactcacctgccttgttttgcctggggtccaagcttgcctctaacagagctccaagaccctccgccatcttgttacgtggggtatcaacacaagtgagggggttagatgaggaaagggaaagaggaaaagatagataggcagaattgaggaataattattcagaagactcaaaggggagcaagagttttgacaaccacggaagggagaagataaaaagatccaaagctcaaagataataatgcgagcgctcagtaaattgtcacagcccacataaacacagggagtacgctaagctcaatcgggttagaatgtcacatgcttgagcctctctctgcctcaggcatcaatattaccctatcggtctttcctgggtatggtcttagaatatagaatgagcgctttgtatgaatgaaaacggaaatacgtagaattgaagggtactgttataacgtaaatatttttattttattctctatattcatatgcttttcgtgacaattacaaactcctacggaaccatcatttgtaaccattaatgcttagacaacaatgttgctgacgccgttagccaaatccatctccttggcttgagacaaagccttgaccttgtcgaaacagccggccgcggcggaaaggaatccaaggaatggcttgctgggtgccagcacacgagaaatgtactcggggtggaactgaacacccacgaaccaggggtggtccttcagctcgacaatttccatgcgctcgcccttgtcatcctttccaatgaagtgaagaccggcagcctggagctgatcgatatactcggggttaacttcatagcggtggcggtggcgctcatcgatagaagtgcggtccaatccgtaaagggaacggagcttagaccattcggaattctcctggaagatggtaggacgggaaccaagacgcatagtaccgccaaggttcacttggtcaatctcaggcatgtacaccacaatcgggtggttggtacgctcgtcaagttcaaccgagttggcaccctccaggccacagacattacgagcgtattcaataacggcaatctgcatacccaggcagataccaaggtaaggcttggacttggtacgggcgtggtgggcagcgcgtatcataccatttgtgcctctggtaccgaagcctcctggaaccaagattccatgggcagtgtggacatcataccaggccttgtgatactccttggagttggtctcctcccactcggtttcgaggtgcgaggcatcaacccaaataatgttgagctttcggcgggaagccatagccgcgtgctccagcgacttgatgacggacaagtaagagtcatggagactgacatacttgccaaccagagcaatgttgacagtttcaaaagtgtgctcttgggcagtcgtaagggtcttccactgtttccaagtggactgacctttgagtaactgatcctgagaaatgttgagcttcttcatgttgagaaggtcacccagaacgccaaggaacccttgttcctcgagaagcagaggcacgtggtaggtagagctgacattgtgcacaccaatcacctgctctggctcaacctgacagaacatagcgatcttatcggtggtggccttgtcaaggggtctttcgcaacggcatgcaataagatctgggcttaaaccagccgagcgagcgtcccggatagcctgctgggtaggcttggtcttcaattcatcgtggatgatgggaaccagggaaacgtgctagaaaaagtcagaattgtctgaaatcgaatggtctgttggacgtacgatctggacgaaattgtcctttccagcccgacggcgcagctgacgcagagcctcaacaaaaggagcactttcaatgtcaccaagtgtgccaccaagctcgataacacaaacatctggctcctcgttgctgtcgtcagcgggggttctagccacacgctcgatccaatcctggatagcgtctgtcaagtgcggcacaatttgcactgtacgtccaaggtaatcaccacggcgctccttctcgatcacatgcttgtagacctttccggttgtgatgttgttatcccttccaagagtaactccaaggtagctagatcgcagaatatcaatcagcctcttgtttggcttcaaaaaaactcatacagaggagaatttaccgctcgtagtttccgaggtcaagatccgcttctccaccgtcgttcaacacgaatacctctccgtgcctaaaaaatcatcatcaggaacagcgttcagaaataaagactgatcaaccacgtactcggtaggggccatagttcccgcatcgacgttcatataagggtcaatcttgatcgaggtgactcgagcaccctgggtcttcagcagcaatccggtactcgaggctggagaaagttagggccgaggggactttttcagttcgatgtatagagaggggtaccaattacgcccttcccgatgccactgatgacacctgttatacatgtgttagttattgctcgttcataagagatcgactcagaataaatacctccagaaaccacaacgtacttcatcctggcgatgatagggatgaaaacccgactgaaaaacgatatgtgagatttgatattgagtttaaaaagaatgaccagtataaccaaagaccctcgaagtagaaaagaaatgtagggtgccgttcctggcttctgccaagggggaagaaagaatcaaataatttttgaagctgtaaaaaaagcgcctttccgtggtcaccgccccccactttgattgacttttctgccgtcccgataactatgagtcatgtgatttgaaagagagtaaagagagggaatatgcttgatggttaaatacgatgagtctgtagaggtaaattgctcgaaaaactacttataacatgtccattacaacctccaggtatgcccttgaccatccctatcaaaatacatttaacaagtatgaacttcgctttgatcctcaccgccccgtctgccacatataatgggcggtgtatgatatcagtactccgtacatcaggtgattgggctggaatatcttcatatccgtgcatgattgattaacccccctcaatccacatcacatcacttgcttgttgtgtcatcgatctggtggggtatactggttttatttatattcatcatctgaccttgttatctcggtccaattcacgatcagctgccaatcagggtcgctttgcgcgcgggatattgatcaccaaataccgactgtttcagcttgctacatatatttgagtccctatatgtgcattttctgatcataggaacatcctatgtagttaatcgctgttgtttgtcaatttccaaagggtaaaaattccctatctgcccttcgactgcctatcatggatgatgcaatacctggactaacttggttgtcaaatagttcacaaaccgcgatctcctgactctactctctttctgccactgggcggatgtcttccgatgatgttccacacttctcccagcacaaaccctcgtcaactagtttcgcagatgtcctcaaaactctagctgtcggtcgatccaaatcgcattccccagtctcattacaggaaagcagcagcgactcactgtcttacactgatacctccggaacaaaccggcgtgcgcacggatccgaatcaatgaatcgtgccagtttcatgtcgagttcctcggacactcccagtggcctggatttcgagacctcactccacaatctatcgcaaaagcaaaacctaacgcaggcgattgaagaagcggagggtttgtcaaaaggtctatcatggttcacctccgagcagtccgtggtgctttgggaggctgccgagtacctattgcgtcatgaaagctcgctggatgctcagcaaagcggtgccagattattagaagcgattgcagcccgtcaagatctgtctccatccgccaggcgcctagttttcgaatcgatcacttctccagccgagccggatgtgattgctgcacgcgtacattcgttgatctccctatcagatcatggcaggaaattggatttcgcaggttcctcaattctccatatcatctcctcgtggattgttccattctatgaaacgattgcatccgcacgatcaaaggcgaaaaaggcaaaatctgtcaaaccacacgggcccaatcacgacgaagcagtctttggagatctcttccaattcgcggtcgacctgatcactttgcaacgaagccagccaacccaggaggaaatcgaaatgcttctcacggaaatctttaccgtttgcaggagaaccagtgtcgcggcggatatcaagaactctttggctgtgttcgacgctgtcattatgtatgccgatgtgcctgacataagcttcccaattctcctggaagtcctttgcagcatccatgcatcagttaaacccctctctgggcccacctcacgagcagtgcgcagtctagcgaaatcacgaagacaggaggagatggtaaacacactccatgaattcctgggagattcgtgcgccgctgaacaaagtcggaacttgaatgttctccgtggtacactttatgtgttctcggattttgttcgtgctcatggccaagatggcatgccccagctttccttcgatcaactcatggaatcattgcaagtcattgctcaaaaagacgatagcagggtggatgccgacctgttagatctttgtctcaacattctggaaggggactatattggagtcgcattagaacaggattggacgggatttgccaatcttctcatactctgttctcgccgactcgtggacgagtcggcgccatccaccacttctgcgactagccctcggctcaaacctacgtacgacgaaaccaaatcctacattctggtaaatctcatccgcattgcttctgtgctcgaatctcagtgggaacaactcaacagagagcaaaagcaacatgcggtccggttcctcatgaagatataccagcacattgagcctccacaggctgaactcatcatccattccatgagagaagacaagctttgccatccttccaccgactcaaattgggctcagcattgtcgtgaactagttgagtgtttcgttcaaccacggaaacaaagctcggacatacgtatcctggctttggacacattgaaagaaggtctttccggccatgaggatttacttttcgtccaggagcacggtctactcgggcttctattgaaggatttttcggcagaacatgatcttctcttcttggagtccctggtgtctttgttgaccggcccggcgacacagtacagtgatgatgacgcgttcaagttgctgataaacaccatcgcagcaccgatgcagacggatctccatcaagaagaaccgcgcgagaatcctctgaacaatggatctcaacgccgtacatccaccacgagtgtcttggagttaagcttgacaaacgtctgtgccgtgggcctcgtgaagatgatgctgcgtgccttgaacctctccccaaccaaagctgttatggttttcgaggcacttctagacattgctcaatctccaagtcgaccaatagactctcgtttgacggtcttgaaactactttttcgattacgatgtgactcagctgggtctgtcacagtcatatcaacctccgagagtgactttttgatgaatgtgctgggtcgcaatcttgatggtggctctaagctacaggtccccggcgacagccccacctgcgagattcctcagaatgataactcaccaatctcgccagtcggaaagcttccaatgagagagtctgtgtcaaccgccatgtcgaagtcggccccggggcgtggctctagctctgcccgtggctcaaagttgacggcgccagtgtggacatatgctttgccacaagtgcttccggagcaaccacctggggagtctagtcctgtcgtatttgcttacgctcacccggaggactctacccccgaatcagaaacaatagaaacaaaaaccaagggggtgttgaaggtcaagatgtggctcgaagttgtgatcaccttgttgcagcgagaaaccgactgggatgtttacagctacattcttactcatatcggtccccagcttggtaacaaagactttttcagagatgctatccctcagatcacgctccttcgcagcattctgtgtgatcaggtcaagaatgaaaccttccacgagcctcccgagactaccggattgaaaaagagcgatgtggctgcctgcatcttcgatgcgctttgcatgcttgtcagctatcacgaacactttgccaagagtgaagaggatgatctcgtccgagctttcatgcaaggtatcatcgggtcatggggcggcacatcccgtgggtgtattcaagcactgtcactctgttgttatgaaatcccaatgtcggtgacgaaatcattgaacagcatccttgataggatgtcaaaggtgatcaccatgtcaaacattgccgtccatattttggagttcctggctctgcttgcacgattgcccgatgtttacgtcaacctgcgtgaggaagagatccgcactgtgttcggtatctgcattcgattcttacagacctctcgagagcatcggtacaaagcctctgaattggccgcaagggccgctctgtcaaaccaatcttcccagactaagccaaaggaaactgccgcccatgcaaatgaagctgtcgagacctcccaagacggaatgtcgaaatatatctcgaatctgacctaccatgtcatggtcttctggttcttgtctctgaagctccaggatcgacccaaacatgtgaattggatcaccagcagactcatatatcacgacgaacatggaaaagaggtagtagaagaacaaagccaagttttcattgatttgatgcagcgagttgcttattcggatctcggagagactatccccttcgaaaccttccctccttcccctgaggatggcccggttgcaaagaagtcctgggttgtcggcatgagtatcgtcactgtcgagagcgccggattgtctggattgtctcaggtaaccaagcgccaggcatctggtaccacatattctgtctatcaacaacggacggccccagttctgccgcatcaagttcctgcgactccagatgcccatttacattccgactccatgcggacagcagtccttccgagtcatatcatgcttcagttgactgctactgccttccctacacctacagtcatgcagcctatcccggttccggaagacgatatcactcgacgtgcgattagttactttgatcgcaccgacattgtggacggacatcgtatcggtattctttacattgacaatggccagacaaaggaggcggatattttagccaacactggtggttctgcggattatgaaaatctgctgtcaggattgggaaccaaagtgtcgctccggaacccccaattcaatccgcaaggattgtatgccgataccgatggtgaatacacctacgcttggcgggatcgtgtgactgaaattgtgtatcatgttgcaactatgatgcctacggactttgaccgtgacccggcctgcgtcaacaagaaacgtaatcttggcaataatcatgtcaccatcgtgttcaaccgatccaacttgcccttcaactttgacacaatcccatccgagttcaactctatcaacattgtcataaccccgtcatctcgaattgcctacgacgaaaatggcaatgccaattgtgagacagacccgcagaagctctactacaacgtgcaggtcttgagcaagcccggattcccagacgtctcacctgctgcggcaccaaaggtcatctccggcaagaacttggcggcctttgttcggattcttgccctcaatgcgtccgtcttctcacttgtctggaacaataaaggtggcgagcatacctcgtcctggaccacccgtctacgcgaaataaagaaagtccgtgagcgggctctcgcagcccaaagccaaggctctgaggccgccgaagtgacttatcccggtctgcggcgaaataccaaagccaacatcttctcggaggaattaccctctcgtgcaccgcaagtacagacggatttcgctgcggaatggaacgcagcggcagacacgaacattgtccagaatttggatttctcccgctgggcccgctagttcgtctttcttttcgagcgtcttgacgatgacaaccttaggcgagatatcctctccttttactgtctggatctacaagacaccctctcccctccctgatattcattcactccttatcttacaccacctctccctccacctttcctttcccctctcgatgaccaatgacccctagacgacttcatgtacaccacttgtgtttttttttcgtgatgcaagacaattgtcgcatttgtaaatacccccttcccgccccaaaagttttttctttccagtgtcgtcttgcctgtcagcgactgtcgcgattaggattagggttttattagtgacatgaatcagtgttcttttactgaactcagcagccttctttaatgatcatcttaaccattcaactctatttgtgtaaaaaaagagaatcccccacgtcatgtaactttatgtgcttccctcgctcctttttcctctccttctcattcaccctctattccttcttcttcttcttcttcttcttcttcttcttcttcatggctcctagtctaaagtgaactatactcgtggactatagtgcagatatatatagtgagaatctgataaatgtatagcttgtttattgcatagaccgtagtcatgattataatgaaggatctaactactgacacatatagttgaaccaaaaggagatagaaaatagaaaggagggaaatgcgatacagagcatgtacaagtgtgagggctaggcgatgcagagaaagggaaagatgggtaggttttgttgtgtacaagtagaaaaagaaggttggacaatggaaaggtcgatccggggacagaaattcacatcccaagtatgcaagttctgtgtctctgggattggaacttctattcccagaccgtaattccttctcaaaaggctactatcaccaaccaaagatctcaccaacactgagagtattccagcgcacaccgccgacggaaacgaccatcaagacaacttcgacaacaaccagtaccaccgagcccatcatgaagcgagggctgaagatgcggtagagcatgagatggcggcggagatggccggcccacatagtagtggcgagattgatagtcgccaggtagaggatatgggttccggcagcctgtacgacatcagagaggatgcgtgtagcggggttcttgttcgggtttgaagcggggacacggtcgtgggtctggaggggacgtttccaaaggacggttaaggggacggcgatggcagctaggatctgtgcgccgaaggtattgaggatgacgagtagtggggaccaggggtattggattgttgtgagggggatgaaggctgtttcccactggatgctggagagcgtagcctggtggcctgttttgaagtaatagaaagagccaaggacgccgaggatgacggggccgatggaggagttcgacatggttaggccgtttgtgtcgaggatctcgaggagagagaggatttgccagaggaggagcgcgatggcgccttggcccattggcttttgcatgaggatgacggcgagggcgaagttgattagtaggaagcagaagtgggttccgtagacattgccaaagccgaggattgtgactgttgttcgtgggccttgttgctggccggcgactataggggccggtgggctgttaggatcttccgtgggtttgctcacgttgatgctgacgcaaggcttggagtaaaggtatgctgcagtgcctgctgcgaacgcgagggcgaggacgaactgggctaggaagacgcgggcgaacttgagtgtttccttgctgacgggtagccactcgccgtcgtcggcgccttcgagaatccagaatatggaggcgacgaaaagaccgaagcggaaggcaaagccgatccatagagatgcgacgccttgataggacttggagccggcgtagtaggaccgcacgacgctgggcaggaaaagagtgaccaggaaaggaatggcaagctgccagggggcagaagtggaagaagtcgacgaagcgtagtacgtggagcggcagaagggcatttgttcttcacgacagaggcgggagaaagatgcgattcggcctaggatcacaaagagaatggagtgatatacccccaagatacggtctgtagtttgcttttgtcgcatggacgatataccggcgcacacagcgaatgtagtgaggaagaatagaagaatttcgtcttcccagatagtgtacgagttggaggcaaatccaatagactgagaaacggtgaagaaaagcgcgagccatccccacatgccattcggaagaggcagagtcatgttcgcaggcttcttgacgagagcgggcgtggctccaatgatgcttccagcggcggccagtagtacggccccatcgaccgtagatatctcggtcaggccagtcaaacccaatgcagaaccggccacggcaccgacgccagcgccgacgcttgcgaattgaagcagacgagacgtggcttgggttcgatctgtcttcaagcctcgggcatagatgatcaacaagataataccagcaaagagaatcacaacaccttggatcatgcttggcacatcgaatcgagcccacaatccacggcagatatcaagagtgtgacgctggtacttgcggtagagttcattgctagcctgagcagcggtcgacttggacgagaagcccttttgagcggacctccactcctcttctgcagcagtccaaagtaaagccgcctcttcatcatcaccagcacctctagcaatcgcatattggtgctgatatctcttgacttgtgctgcagtcaaccggttgacagtcgctagatttgcccagttgttcccacgtgcgccacagaaagcctcttcaataggcgatcctaggttattgaatgggatgggcattccaaggagtaaagacaacgtcggaacgaggtcgatctgaggcacgaatctgtcgcgcgcgaattgaggcgggagaagcgtatccttccttgtgcgtccgaagatgccgcgcttggagtacatccacaacgcggcctcaacctcgtcatcagactcaccgccgtggtcgcctttgatgtccatcccatgatctcccatgatgaccagaagagtgttatcatcaagcgcagcaatgatatcgcgaatgacacggtccatttcctgaagcttggatgccatggcagcatgattaggaccatatcgatgacctgcatgatctacgccgagataatggccaaagataacatcccatttattcctgttctcgggctggagaagcgggaagagatgctccgtgacgccattgtcgacggtatgcaagtcccagacgttgaatgagtcatacgcatgcgtgagattggtatcaaagtagcccgggaagagcgcctgccaggtatcgtcgccgaggtgaaccaggttcttcccggcgctatgcaactgtgcgacaagattgtcctcgtcgatggcggttccggcgaagttggagcctgcgtcgaggaaggtgggcagggttccggtggtcaagcctttcagacggttcagggttgttgtcggaggatcggcaatgaatggcaggaggaaggcgttggcggggttttgcactgcggtctcgtagaggacagggatgttattgtggaagaggtgggctgtatcactctctcccttcggggcgaatggcacagtgaaatcataacgaagagcgtcgattatgatgacaacggccttgtcaaatgtcttctcgtgccagcagcctttctgctgtttactccctagggctgtagtatgttgggctaaagtgtcctcgaaaggcagtatgtcgcatgatgatttgttctcaaggaccatgcgcgtgaggagaaacccttttgtgaagagataaataccggcgacatgcaaaagtctgtcattaaccagcgtcagttcacatttattttttaacacttcaacccggcagcgggccttaaacctcgagctctgctaggcctaggcggaaccactcacaatatccacgccagaacacccatcacaccaaaatgcttaaccttaaactcatcttcaagctccagcgccttctgatccaacaggccagcttgcttcagcttggactgcccgccagacgatttctcggagctgcgaggggaggcagctggaagaccgcttttaggactgctgggatttggagtccccatagtccctgcgggtcgcgtgaccatttctaaggtctattgtattgtcgcgggtcgaagtcggggccagctggcgcaccaggtcgcagatctggcttttggaggccgaaagggcaccgaaggaaccgtgaatgatgagccacggtgtgttttaggcgacagggaagccgggagcaagcacaaatgatccggttgaatcggttcaagcgagaaccctcgaagtagggtaaaaagtataggcgggggggcggaggagatggcggattctgtgctctgtcgaacggcttccctctgtatcaagaaactatatcatgcacattgtttggaggagcaatgtataccaagcgcaaataatagggggaaagctgtgtaagtaaagagaataattctaatttccctgacagtcgcggaacccacgggttggggaactcggcctcggcgtttctcattggccggctggcagcggatacaactacatagtacaccacactatactgtatacaggagaagagagagatatctggggaaaggatagattccagatttgcctaaatgtcacgaaacataggagggctaagtacatacattatccagctgccgggtaccgaaaaaaggcacatgagaaggaaagtaaaatagagggtccctcaaacgtaaaaataggagcctcataaaggggggtgaagaagagaaagtcaaaagcatgaatagtcacaaatatatcgggccctaggaacatagcagggacgaaaggtacatgaggagccaggcttaagaagtcaaacgccagaagagaaaaaatcggcaggccctcgctacgaacgatccagtttcaatgaatattggaatccaagcagtgtgagctacccatgagtctgtccagaaaccgggtattccgacggtgtgcttttgagaccaaaatagaaactgaagggcatatgtgcaagccatataggccaaatcggaaaggagagatatgtaaaaggtgaaatcgcaaaaaatatttgccagggtactcgtcatgctttgagaggtcgttgaaggtttgagagagattgagcgctatgcgggtgggatacgcagtcggtcaattgggccagtcggtttgacacgcctttaatggtatgtcttcgtctcctctttctccctcagtccacccatccgctcgatgtccagggactggaagcgaccggtgtctgtgctttggtagggcggaagatcctcatggcacggttccaagccgatgctgcccgcgtcactgatgcggaccacgaccacgcggccagaggtgcgtttgccgcttgcatcctcttcttctgggaaggtaatgcggatctcaggcacagggctcggtggggggctgtcggagttgtccatgaggctgcgtttctcatcatagacaagaatggagtcggttttattcgtcgaaatggttaggcggcgcctgttgggtgactctccattgtagactgggagcaagtttttgttccgagactggcgcttgcggcggaggatgagcaggccaccgaccagggcgagggagagcagaacgagaaccaggagagcaatgagtaggtctaccatggcgtttgagagtccgccattgctatcatcgcgagcaacaatgcgggggaatagattgttcatcttgttgattgtcgattgtggattgtcggttgtggggtgtcggttgtcgatggttggattttcgatgccgagtttgagaattgtatgattggaagtcgacagctatgtatcgtgatcgtcgatttcaaattccaaggaaggtctcggaattaatccggggaagtaaatactgatggaatgtgcgtgcaaatatcggtcacgggatcgtgtcgaaaaaaagggcgaagggtcgaaacgagagtgagtaggttaacgaaagaatggactgcaaggtgagccgctgaaagagtgaagctggcacctgcgaaggaaaagaatggaggggatgagatgagaatgaagggaaaacagaaaagggaggaaggggagaagaggagaaggttgcaagcctagaacggcttgctattgttagtgtcgagctaagctcttcgtggtttagcctggttccttgggcgttgctcggggcctcttggccgacaggggttagccaatcacaggcccccagtgcctggagaacgggccctccggggtcgatttgcgccctctcattcggtggctccactgaactatgccgattgtattttgattcccctgagatcctcatggacggcataaatctagggctatacgctgtgtatagattggatagatttagatcgcaaacacaaacatcagtaaatgtttcgagacaaaaaagatagtcacgggtagtgcttattctggttgcacaagcgtgaatcactcggatttaggcgtacggtgcaatgtcacgagccctaattgtctaggtacatactacatagtgacatgatctgttctctggggggatcctcgtgcgaaaataacaggaaatgagtgtttcaaaaatatgtggagagatcatgatctcatgcacctgatcttcgagacataaacaaagcccttgtttgcgtcaaccaaccacaacaagtaaagaagtaaatcgcagctattgtttgttggaaataaacaaaagaagtaaggaacaaattgttcattttgaaaaagtggacttattatatcatatagacaaagttgacttagtcgaactatgcaaagatgccagagatatatttctctttcgctactcgacatactcggtacgctcgccttagatcacatgaaatcaagcaaccgagacagaactggacgcgtgattttaaatatatctaggtaactcatgaacaaacctttctgagtactcgaaggtttcattgaagtccaaacatttacatccatactcgaatcgaggtaggagatgagatcgttgatctctgtttcatagattggtgtttgcactgtttgcagaagtggataactacaactaggtatcccacttcttacttcctgcttccccatctgttattttttaattaaagacctggcttgtcacaatgagctgtttccaagttaaattgagcaagctcgtgtgaagatattctcgatgccgacccaacgcttagcccaaaccacaaagtggggttcggaggctcgtctcacctcacgtgcccaagctgaggatagtttgacagactacaacggagagacacactgatcgatataccgaaaagcaaattcacacggtcggccgcgctatgtcgtgcaattttgactgctcggctcccacccccttatccccaaacagcgatatcactgggattggggtatgagtttccctttctctcggccgcggacgcatctcacactcttagatcattatcaacaatatcgtgactaccggcatcgctgtagtgatcatttcaatttactacttcactgcctacgatcccatccgcgacctgcctcatgatggtcaaactccgtttcgacccaacccagtggacgtatcctctttagcattgttcaaatcatacctaagccctttcgtcaaaattgctaggagcaaaagatttgcgaatgtcctaatcaaggtgggtggattcttatgagatcggatcggtgaatcatcaaagtaacttcgaaaaacagtgcatccgagcaatgagcgatatgcaaatcatgacaggctttttcctcctgatcagcgggtattcccagctcaaatgcggcctggcaacctatcattggctagtcgttgttgaccaggcctggctttcctgcctagtccagttatcctgcttaacgcacctacgcagttatttccacaaccgccctatcgagcggacattacggttactagcagccggtgtatctacgataatgttgatcgtggggcttagtttcacgggaaactacgattgggcctttaacgcagatagtagcgatcctgatcacccgacgattagtgaccctgcaatctgttatatgcgcgctcgtccggcgatgaattcggcctttttttcgatgcctttctcgataattttgattatctttggatttgcttcgagggtgattaacctctacgatacgctttcagttagcgttgttagagctagaacttcccttgcaggacatatacgagggttattacgcattgtgtataactggagccgggcgtctcgctcgccacgaagtctgaaattgacacttggatatctccccctcttagctctatacctcacggggtctgtgtttgtggatgtgtgggattccgctgctatagaggtcagatattatctatgggacgtgtgttgattgtattctatgttctctaactcgatactaggtcgtctggttaatcatcgcctttgcattcggtatcacccgagtgataggaataatacatcgaccggaaaagatgggcctcgacgcttcgttgactagtttcaatgattggtcgtttggccaagttggtgctatggtggtactagccgcaccgcttatcacactcatcgggttgttctacgagggtgagtcaaaccatgattatcgtctagaatcaactgagatctaacactcgtgtagaagacgagactcgtgtacaggatgaggaacctctctccgacagccaaaccgcaccaccgccggaactcccggccccttctatatcaaacgtaatcacggacctcaatgatcccttcaaggattggatctcgcactctcaaatattctatctggtcgacggacatatattcacaatgctcataagtgttttcttctggatggcagagcgtgatcctttcggcaagataaagaagacattattagaggatattctcgtctcctcgggtatcaagatggttgtacccattcttttctctttgatggtggagactatctttgcggaagctggccctactagtatttcttacaaccttgcgcaagttgtggtaaagctgcacagcctgagctgcctgacgtttttcagtgtctccagttctacgaagattacttattgtctcctgcctatccttgttatctgggctttggcgcatcgcttctatcccttttttcaagctttattctcgtcgaagttgctggcctttctgcggttgtcatgacattaattacactatgatctttccaaatgttgtttccccatgctctggtcctccctcggttttatttgatccatccacattccatgcctcttcgcactacaaacgagagaattagagtgattccccgtttttgagagcggagcgacatcattcacagctgcatagctcacctaccccgtccgatccctctatcgccatgaacggatcgcgactcacgatatctctcgggagagttcacgaacaacatagaagctattgaagccaagaatttacttcaattcttaacttatgtacagaattggtgtgccactggtgtgcggttggtgtatgcaattgaatcaaataacatattccaaaatagtacacgcagtccgggtaccacaaataaagtacctagttccagtgtgagtacttggtgcatggtctaattactggttaaatggtgttagaagagctatttcttcatcatacatagagtgcatctggacatggtcttggagcgacaggtgtttagtgtacctttgaacccttcttcagctaacactaatattatatgttgatttccaaaatatgatctgatcaatagtatgtattttaaatgcatgaatggagatcagcatgtatatatctggcttaggcgatgtcagtcaaagctaaccttcgaagtcttaccctgccagaaatcccccacagtcggcgaccaccaaactccccggccttttgtcgacactgccaagaccgacactcgagatcaagaacacaaccaacaccacgtcgctactaaaagttgtcaactgcaccgactgacatctcctacgttatccttggcatacagtgtaggcagactccgcacgtttgctatgcggtcaggggtcgccaacacacaattcgacacctcacaaacccggagaaaggacgatcacgatcatcacaaatggtaacacggccaacgctcatgaacgctgcatattctatgcaagccagcggtcatcgcgctcgggaccaccgagtatgcctaagcctacaggcgaaggacgcaaggcaggcaatgcccctcagaaatcaatccggggaaggtttctgcgagtgatggtctgacacttgacctgtgcgacccctgtgcaaggatccaaaggcgagtatccttgtcagtctctctctgccagtctatgtctcggcctttttccaatctcgccggggaaattacaccgcgatgactggataccgtacgtcggcaaatgtccaacacatgtttgatgacgaccgttcttctttctcatttctctgctgggtattctatgggcttctgaaccggacagtaagcatttagttctcgtcattcaacaggctgcattgccaaattcgcccacagattgatctaagggtcagtgtgacgatgcgccgaagcaaggggctggccgagtctacggaagtctacccagttgagaccctatttccgcggataatatttatggatctgacacttttcatagcgtgaagcatacttctatggtcgcgcgcgagactattgcaccactcgcagttggggtttggctcattgatctattgagagtcagaatcaagggatcgaagggcaatcccaataccagcgcacggccgaaaaacagatggaacataaacacgaaaaaaagaaaggaaaaaaaggcaagacgaaacaaaacccccctccctccattgggttcctgaccaggcggagaaagtaagccaacgagagagacgccttgccaatcctggaatggtaggtaatccgcaggtaatccacagttagaaaggtggcggcccttggctctttttggtcaagaatgtttccggatccaaccggacgttatacgagatgtttaaagcaagagtactgaatatgtagggcataggcatatatggggtgtaccttacttgcggttaagactaaggtgggaggggcttagtgggcccgatcctccagaaaccttcaatcttttaagataagccgagaattatattaagccttagcttcatttcgggacgaataaggtagaatcccggccgtgaagctggattccttcctgattctttctagcgaaaagtttcttgtctatattagacgttaccggctccattcgggagtatgatctgtcttttataggggttccatggtccatggtcaacacatataggtgttctctagtggagtggtgaggaacttttagccgaagtgtttaatttcccccatggtgacttcagagttgctcgttcacgtctattacatgtcctatttggtagtattccagggactgtttgttgatgtactgacttggaccatgggagatgatgtgagtagttacctaatagggcagtataggaaaggttgagtgtagagtgtatagagagatagaattgcaatagaatatgcaatgcaatgtgttccaatagcagtgtgtatgtatacaatccctatatacatcctctcatgcacatccagatatcacgatgtagaaacaagacaaagagatggggccgggctaaaaagaagcgccgggaggtagatcgcggtgacggtcagatacatgcgccataaacccaaatggctgcaaagatacctgggtgcacagccaaactctaacctaaacgcaagtaccaccatatcgcatgccggatcgccttcttcatatggtcatggtattacgcggcaatacagcggctgatcggcctgagcagtcatccagcttcttgttatctatccaattgactcttgtcctgtcactttttcttcctttcttttcttttccttcgtgtgactcttgcttgaattcgtccttttattccatctgtctgctccctttttttctgatcttttcttttttttccatccatcaccgcctcaccgtcatccactcccccaggacagccacacacaaaaaaaacccttgggctgtcatgctggcgcctgtgtgacagctggactacattaatgccgtgccttgtctctcgtccacattcccttccatcgatccactgaagcccggattctcatccttcttgcgcgagcgcattccattatcctctcttagttccgcctactcgaaaatcttcccccctcagacatccaaccaccccttgcctacgccaatcaatctagggtcccccaacgttctgattgccattctcggggatcgcctctccataaggcacatgaggacgatctgcacactgggagattcctggagcatgcacggagcagagtaacgtcgcggcgcctcctcaattctgaactttccggctaccaacttgcgaccccacagctgcagcaaacgaaagggtgataataatcgttccaattctttgtcaccttgcatcttctatcgctgtcaggctcgatcgaccttcctgccaccttcaacatttctcgcctcatccagagctcgttgctcttcctcccttccgtctcccttctcttgctcctgtataatctgtacatgtcctgggttcgccgttgaacaatacagaggacaacgttcgttttctcccatttcgctctttcttgtgatcccttctatcccctcttttggtgagctttcccttccagacacctgggcaccctagctgcctggatgcccttggacctttctccacaccttgcaacgtttccccagatggcccagaccctgctaacacgggcctcttctcatcgcagtcttatattccttcgtgtacgccgtctctggtgcctggtgcccgtttgcaaatactagtcgacacagcatcggccgatcgtctcagctctgtgatttattactacgagacaacactccgaaaaaaataatcgtttgccgttcgggtacatatcgaattactcttctgccgatcggagatttcctgggatggcttctaccatggccgcgaatgcaaccagcgtacacaacgtgagtgaaacacatgggtgtggatcaatggaatgtcgataataacatcgagtctaggcacgatcgaacagagcgtccaacatgggttcatccgggatgaacgaccgcaaccgcagctcacaaagcaacagtgtcggtaaaggtttcggtgctagtaagactagctggaagaacaacatctggggtgactccaacctaggaggattcggagatggtgagtaattcgtacaccaattgcgacttgggctgtgctgacaaattttgcagaacaacacctcggcgagactgcattcgaaggaaaatctggatctggttcccttctctctacatcagagtcagacggctggtcgggacgtgccaacctgccttggagcactgtcaacaccaacccctccttccagaatagaggcctcgccacatcccccacccagattcgtgcaaatgaccgcagtgctcctgctctcaacgaagctagtgatggctcttacttcgctctacctcgcaccactgggaccgcgagccagcgcccctacctcaacactagttcggagggtgtatctccatccggagaaggcctcaccttcggaggatttactggtcgacgacagatgaactcaaccggtctcggtggtagccctgtgggagcgactttccctgtgaagcctggattctcgaaccctctcgatgctggaagcggagatggaatgggtacttcaatgggcatgccatcgttgggatctggaattgccgagcacatctctccaacacagggccgcagcggcctatcacacgcgtctcacaactccgcctcttacactactcaacgacccactcactcagctcatccttccttctactccgacaatcacagcatcgatggccgctacagcggtggctccatggacctcaacgccagctttaacaagctacagctcaacgaagctaactatgcctcccaagcggcccagcgaccctcgtttattccccatgcttcctttgatggctccttcccgcgcggaaagtatcagaacaacgaagacacttaccaggcactgggatacaccgcagaggctgcgcaggagatgcaccttgcttaccaggcacgaaccagagctgcgaacaccggctccatctcaccctccgactatgcccgcatggatagccccatctatcccggcgtggacgggggtgctcagtatcgcaatgcagctccgagtgaaagccaagtggcagcctttgagcgcagactccgaaacttccaggagcaggagcttgcccaaggttcctcgcgattgcagtaccctccttcttttgacttccaagcataccaggcttctcgcatgaatgcaatctctggattctacccagtaggtcatcttagtggcctcggtgccgctgctctggtctcacgcactcaacgcgagcatgatcctacccaggttgtgcgcagccctctcctagaagagttcagggccaatagcaagggcaacaagcgctacgagttgaaggacatctacaaccatgtggtcgagtttagtggtgaccagcacggctctcgcttcattcaacagaagcttgagaccgcgaacagtgacgagaaggagcaggtgttccgggagatccagcccaactgccttcagttgatgaccgatgtcttcggcaactacgtcgtgcagaaattgttcgagcatggaaaccagactcagaagaagattttggccaaccagatgcgcggccatgttctggccctgtcgacccagatgtatggatgccgagtggtccagaaggccctggaacacatcctcactgaccagcaagctgtgatggtcaaggaactggagaaccatgtcctcaagtgtgttcgtgatcagaacggcaaccatgtcatccagaaggccattgagcgtgtcccctcggagcatgtccagttcatcatcaatgcgttccgcggtcaggtcaacagactggctgcccatccttatggctgccgtgtcattcagagaatgcttgagcactgccaggaggtcgaccgccagtccattctggccgagcttcatgcctgcacttccaatctgatccctgatcagttcggcaactatgtcatccagcatgttatcgagaacggcgacgagaaggaccgtactcgcatgattgacatcgttatgggacagctcctggcctactccaagcataagtttgctagcaacgtggttgagaagagcattgagttcggtgcagaacatgagcgtatccacatcatcagtactctaacctcttcgaacgaccgcggcgagagccctctccttggtctcatgcgtgaccagtatggcaattatgtcatccgtaagttcaataccatcattttttgcgtgctatgctaacccccaacagaaaaagtcttgggccaattgaaggatgccgaacgtgaagctctcatcgaccagatcaagccccttctcagccagctcaagaagttcagctatggaaagcagattgtcgcgatcgagaagctcatttttgaccccaactctcctgcgaccgtccctctgtctcaccccacctctaccactcctccccactcccacaaatcctccccgcaacccgccaagcgctcaatcccgactactgagcagccccgggcgcctttcatgggcaacgctccacctactcctcccccgacggatgctcagaccaccgtcgatactaccctcgagtcgaagggcctcgccaagagcacggtgacctcggtttcgagtcccgagacaggcaacaccggtgttaccgtcccggtcgatgtcaccagtgctcattaattcgctgcacactttatcttgctcgcccaacataatctttctaatgctgatttgatctgagccgagtgacttcttgttctatctaatacggggcgtatacatacaggggaatcaggcgggatatatgttaccaacgtctatgtgattctcccctttgaccatgctttgacggcgcaacaatgagggcctggaatgtctttatttctttctttttctttcttgtgttgatctcgacctcgatctcggaccgccgacttatttcttatcttactttatttgttcttgtttctttcttgacatgttcatttattcttatgattgtctttgtgaatcattgtcaattcttcttgctacgaaatccaggtccggcaatcgatatggctccggcgtctatgttctttccacttcttccatttttatcttgttacggggttaaggcggctgtgatgggggaaaaccggcaacggaaatgggaacgatctttcgctcttcatgtcttccgaccgcatatgccatagcatggagtctggaccatccatattcacattcgggtccagcagaaaataccacgaaaagaatcaaatcaaccactttgcacatcagctaccttgtccatggcatctgcatgatctactcagagccacttgttactatttcttcactggccgagcaacatatttagtcatggccatgattctcaattacgagatccgcgactttcctttccgtatcaaggtgttcttatcaaaggcgtttctacgcttctcggtcagcatggaccattctgcttggctttgggggcttgtcataactcccagctcttgtggatttcatgcttgttttcgggttgccctgttgagaatttctctcgtggttttcttttcttcctcttgctagtggctgtgtatcatcaatgcattatgacttgacttttaaattgcttcagtatcattgagaatgattcgtaccaattcgctcatgcatcgtagcatcctagcatttagtacaagcccgaatgtgaagtattgtggtacgtagtggccactcggaactcgatcgttctaaaaggtattctaaagtgtattctagtacatttaaacagaacctaaaaccgagtcactgtgcactgcgatagttgacctatacagaaccatatcacacgtgactcccgtcccgtgatgcccgataagacgatgcattttgatagagttggagcaaaccctcaacatttccagtgaccagcattgtttttctgcgcgtcatcggatgaaaccttcagcaccaaccaatccacccatcattgctgaaatccgaatccgagctcgaaagaacctccatccagagtcggcatctagaccagctccaagctctcatccattccgcaaaaccataactacaaacctccaacaataatcaccaccacaaaagccacacacaatcacctaccgaagaatccaaatctcctacttaaactccactacttattctcccaacccaccaatcaccaccacaaaatgtcctccaacgtcggcctcacaaccccgcgcggcagcggcacatcaggctacgtgcagcgcaacacagccctcctcaaaccccgcaacaacggctacggcgccccatacccgcccatcagcggcgcaaacggcagcgggcccatggaccgaccgttcaagcagcgcgtaccggacaagcagatcctggagcacgaccgcaagcgcgcgatcgaggtgaaggtgatggaagagcgggagcgactggaagaggagaacgagcggattgaagaggaggcgggggataagaagaagaaggggaagggtgggcatgatggcgagggggagaaggagaaggagaaggttcttactgaagaggagattgatgagcgatgtgatacgcttcggcagcggttgctgaaggagcttgaggaggacttgaagcgtgcggagtcgggcttcaagaagcctttctctggctctggggctggggctggtagggacaggcgcaattttaagtcttatcaggttcatgagcttgctgaggcgaagattgaggagacggagaggttgcgcaaggcttttgggttgagggaggatcgggagactggggagatttcgagttctcgtgattatcgggagaagaggagggattagatttgttcttttctctgcttggttctgcggtttgcgtttttttcttctcaagtaatggttggtgttgatcggtgttagggttatgggattatcatggaaatagggttgcatgaacaagtttctttctttttattgttgtccatgttatgctgtacaatcttcgaatgcaaagaattgaacaattggatatcataacctcatatataatacaccaaaccagtacctatgccacaaacttttcaataacccaaccctccttcgggtccttcttctgcacaaccttcttagcaggcatcggccaccccacactccccgaatcacccaccaaagcaggaataacccagcaagatctgcgcggcggcacaccgtcaatagcatcagccttaccaatcggctttccatactcaataagcggcgtaccatgcgcaatcgccgagagctgcaagccactgggcgcaacaagcgggaacattctaatcttaggaacctggtcagagaccagtgaagcagaagactgctgcagatgcgagtaagtgatatactgtggcatttccttcggcgagagcttagctagcagcgaagacggatgcacatagacagcgcgttcctccaggtcctggcccttaccgtcgcgggagcggaagagcgtcaggtaagggacgtctatggcgcgacggggcgcacgcgggttctccggcgggacgggggcgagatcagcgcggatagcgacatggtcgatgaagcctgctgtgacgatctgcttgagggccttgatttgctttggtgagggctctggcagacgggcttcgtaggcggggacgacgcctgggttgtttgagcgcacgatgtcggttagctggcggcggagctgggttgcttctttgaaggcctttgagcggaggaacattttttcgcagaaggcgtcgccgtcggaggcgtagccgtaggcgcagattgctgagagggattttagcgcgtctgaggtgtcgtcgtgtttgctgaagaggcgttgggcgcgggcgtatgctttggtgcgctgttcgcgctcgtcgtcttcgagacgatctgcgtttgtgtagaccttgcgtctgtcgctgtcgctgtcactgtcgtcgttgactggcttcttggctgtggtgggaagggggttgttggggtcgagctgattctcttggacgaagaggtcgccgactgctagggctgcgactagggcgatcacgtagggcatgcagccgtgttggtggccgatgtggagcattttgctgaatcggggagagagggggtatgtcgagagacgacggccgatgggcgttacctggccgtcggctgtgagggccccgaggttcttcagcagtttctctgcctttgcgagaccttggcggctcggtggtgtggggaatgggaaattgatcacgttgtgaagacccatgcttttcatctggaggacaacgccttcgatgggcgtgcggagaatctctggctcggtgtattcagcgaactcgctttcatagaccgcagatgagtacattcggtaacagtggccaggccctgttcgaccggctcgaccggctcgctggcttgcgcttgccttgctgatccagccgacctggaaactttgcactccagtgaagagatcgaactgcttctccttggcgcgaccgcagtcaaagacatacttgataccggggatggtaagagatgtctcggcgacgttggttgcgaggatgatcagccgggagttctctgggggcggctcgaataccttcatctgctccttcgtgggaagttgggagtatagaggcaaaacgtgaacgcgagttgacgagtccatggcctcttcgccttcggcaagttcgaagccttcgtcttcctctgcgtcatccagtccggtgatctccatgtcactgtcgtaatcgtcatgtccaggattatccatctcggtgccgcccagctcaaggtcctctgcttccagaggtgcttcagtagctgagagttgcacctttgcctgtgtcgtgtcttcccgctgagtaggtttgaacgcctgcttcagccgcttagaaagctgccggatttcgttctgaccagtcagaaagacaagcattccaccggcaggtagtttgcggtgtccacgcgagaccttgcggaacgcatcctcaacataatcacgctgggtgcggcgggagaaatgaaccgcaacagggtattggcgaccctcggcttgaaccaaggggggtgcaccattgcggaaaagacttgggttttcagtgaaatccgaaatacggagagtggctgacatgatgacgaccttcaaaggcttgacagacgggtcctcctcgctcaaagacttgcgcaggcccacaatacggctgaccattccaatcaggatatcagtgttgacgctgcgctcgtgagcctcatcaataagaatgatagagtatttgcgaagggcaaagtcatctgcaatctcccgtagaagaataccatcagtcatgaacttgatggctgtcttcttcgatgccgtagactcgaatcggatttgataagacactttctcgccatgttgacccaattcctgggcaacgcggttcgccatactcacggctgcgactcggcgaggctgggtgacaccaattagacccggattagggctgtctggggagccgaagccagattcgaaaaggaactggggaagctgtgtggtctttccactaccagtagcaccccaaatgacgacaaccgagttgttgtgaattgcctccataatcttttgttcttcgccaacaacggggagtcctagacgggcggtttggatttcctccgtgcggttgaccgcgacactgtatgccttccgattaggatcgccatgagttacctgaagctcccgagggaggggttcttcttgggtagtattgtgggttgctggcaacttagatgggtcaaacacctgcacttcctcggtcacggctccctcgttgggtttgaagcctgcggcttcgttgatttgttgtaccgcccaagatttaaaggctgactggcgagtcttgagcgttggcttatccacctcgtcatcattttctgagtcttctgagtcttctgagtcttctgagtcttcatcctcatcctcatcctcagaaatgccctcggaggacgaagtatcttcctcttcagaaccctcttcaatatcactttcggactcgtccatatcgtcctcatcttcgtcttcatcctcctcacccgaatcaaagccctcccatgcgacctcagcttttaccggtgcaggtgcgggtttcttcttcggtgcgcgcttccgcttctttagaacagggaatccatcagctcctagctctaatggtcgtttaagtccacttccagcagcagcctcttctcgtaatttttgttcattgggatctgttgcgggatcggaaactttcaggtggatgtccgaatcgtcggagtcatatcctgagatatctgcggaagcattgtgtttcggcgcggatacggctcgcgatgtagatacgtcgtcatcctgtctcttgcgcttgtggagatctttggaactctgtaaagccgaagtgtccacagacgattgagcaagtttcttcaacaattcgatattttcttccttcctgagtttgttttcctgcaggtatgttagagccatatctttctattccaggccatccacatacaatatatttgtccaagcgcttctgcttctttgaggacatctgaggatgctgctcttgtagctctcccttcagcttctgtcgccgtgcctctttctcatccttcgaaacgggctggagctgtgcgacattggtatcagccgactcgccgtctgggttttgccggtgcctttgttttctaagacgtggtgtaaatttaggtggcatcttggggtactgcagccactccggctgagaaaaaaaagtaaattgactaagtatgtaagctctgcgatccaactatctcttcatcgaaaaaaaattagggcggtcggatattgctggttcggaccgaggcggtgaaactagccaccgcctacgagatacacctagttaagcccctcattctttagtttctcttcagtatttcgataaagataaataattcaaatcaccatggctggatcttttgatacaagctctctgcaggattccctcaacctgccatttcctgctaccactaagcaggtggcggggttagtcaatggtgtacaaacagatgtgatgataatgagctttagcgataaaatcatggtcacaatttcacaagcaggacgactagcgcactgggtatgtcttgcccttgctttcagaaaacatcgctaattgtatatagttgcatgtaccaatggagaatcagaacccaggcactgagggcatgcacactctcgctgagggcgatgatgctctgttgccccttaaaagtctaaccaccaccactttattaggtggctattctcctggacaagatacgacgggccaactacttgctcgtcagattgctacagctattgcaatgaaaacacctagtgaaaagagactactcctcgttggccttggacttggcaaatcaactgctgatagagattcattcttcgctattgttgacctggttctgcaatgtctatgaactgagcatagatcgatctctgactgagaacaaagcagccctcagaacgaggcatgcgccagacgtcgggcgcgcttcagaaactgttccaggccctcatttgtgatctctccgtgaattcgaatgcgctcaacttcaatgaatgcgccgcacatcaacaagtccgccaggtcgacctcattcatctggcccccagctgtccagttcttcctcaattcgacgatcagcgtgcggacggcgaggaatccatcagttttatgccgggtgatgaacttcagaaattggcgagtgcgcttctcggctttctcggggtcgttgtcaccaagcgcgattttgattgctcgacaccggactgtcgacaggtgtcgcaacactgggcaaggtgggtcaaggtacgcgtatctggcgaaatccatcaacaccagagtccgattgctcagcgcattgatccatgcgaaccacgcctctgacatccagttgtacgatacaaatcgcatgcaagtcggaatctttgggaccatcccatccttcttgagaaagacgggctcctggcagtcgtcgaaagcgtacttccaaatctttgcgcgaatctccagcggcagccaattgaatgggcacgggctccgtctatccacgatcacctccgggggaaatattctcatgtcggcgaggaaccttttctcgaatgattcccactttgcgccaaacagcaaccagacccttcccttgaacttatcatcggcacgacgggtgatgaagaaaagtggtgtatcggaactagtactttgttagatcaaatggacttggtggcatcgtgcccatagaattgtatcgcttactatgcatacggcatcctctttggtctcgggactacctccacttggtcagactgatgcagaaccgccgaagccgctggacgtggggcttttgaaaccggggcctttgaagctcgaacctttgaaactcgaagcattgaaatcgggaccttcgaaatagggaccttcgacagtggggcctcgaaaactggagtctccgaagcggaggcctccgagaccgggacctctgaagcttgaatctctgaagccgggacttgcgaagccggggccttcaaagctggggtctccgaagctggggtctcaggaaccgggtcctctgaagcttgaacctttgaagccgggacctccaaagctggggcctctaaagctagagcccccgaagttggggcatccgaagatatcgctttgtcagaatcgcgcttggccgaaatccttcctcggatacgctcacgcacggccgaaacctttccttggatgcgctcacgggtgcccgaagcacccgcttggatgcgacgaacagttttcttcattctgttcactaagtggtggccatgcgtgatgaaggagtgagatgtgacaaaggagtgagatgggataaagaagcaagatgagataaaggagcgagatgggatgagagtgagatgggatgaaggagcgtgaggggaaggatcctgatgggatggtgtcgccggcgacccaacgaggcacacgctcggcgcttcccccactactatcgtcatgtctgcctgcatcttatgacttgagtgtttatagacgccatgactgctttgatttagagaactcctagtggtcaattacccgtatatacttgttcggagttaggtctatttcggtattattctgtgaatcggaattgtttaaggctatctatcaagagtgatcatcatacaccggtctaaaaacgtagaagatgatggcattttgaatatcaaatcagttttcttcctatgaagtgattgtaggctatgactagcagagatacatttgatattacggtatggccagtcacgtggtagatattgacaaacaggggagacgacatctgtaggtccgacgtgaacagatgagttttggggctggcacaatcataatcccctagtcatctaaaccttcgtctgctggttttgatattccttttagtgtatacattctgcatcctcacatttgaaggtcttcttagatttcatactccacacatcaaacattctatttttatctgccgcccgcatcatttgaatcctttatcttcatctatttcttttcaaaatcctgcgtttcggtgtctgtaaagttctgcataatggagccacaagtggatcctgagttaaccgctgccatcgaggcctctcgccaagatatgtatcgccagcagaacaggcgagcgtcccaggataattttgtggatctcaccaatgactcaggtgatgactcggacattgaggaggtattccccaaatcaaagtctgtcgttagttccgagaccgaagatggcgaagagcacgagcagctgcaacgcgcccttgctatgtcgatggagcaggatgcacaatctcccaaacatgctactgccccgcatgaggtctctgcagcgtcgacgggttcaattttgggcatgaaccgaaagcagatggaggaggagcgtcttgcacgtctggccaagcgcaagaccgacaactctttgtctgagagcaaggttgatgatactacgtctaaacgtaaggccaatgacacttcatctaagcgcaaggccgacgatacttcgtcgactccgccatctccagttagccggaagcttcctaggactgagcctttgccagcccgtcactctgtcgctctagccaacccgtttcaagatgctccccaggcaagcacggctcgagtgagatctcaagtctgtcgccagcttgcaacaaatgccccgaatgttgacatccaaccgacctcctgctcagtggcccaatggcctcttggagctgtcaaaaaaacacatatcgccggcttccctcgcagtggaaatgacattacaattgaagaagttattcagcgaggagacttggagttgggcgtatttagctcatttatgtgggacattccgtggctttgttccaagtttaacaatttaaccacacgaatcatctttgtcatgcaagcaaatgacgaagaaacggttagcaacacactatgatcttgaatgatacgggctaacgtgacttcgcttacagcgagagcaataccgccaggacgttagccacatgcccaattttcgcctgtgtttcccgccaatggagccacaggtaatctgtatgcattctaaactgcttctgatgtttcaccctggatatcttcgcatcgcagtcccctccgccaatctcactcccactgactggggagaggataggctcatggaaaacgtatgtggctacattcgcctgatgttcatggattttctaacagtgtgcagactgttttccttattgatctgcctaagctcgaagttcctggtgctggaaagaccccattctacaaagaactagtctacttcctccaggccgaggaactccaccgcaacatcatcaagaggctagatgagtttgacttcagcgagacgaagcgctatgcctttgttcatgcagtgtatgtattatctccctgggtgattcccctggcaaaaaccagcaaccagctaacaatctaagtggcggaacaagcaccgaagacaactggaaacgtactggagttagcggtttgggtcgtgctgtcaaagctctcggcctggagacaaacgcgcccattaacgtcgactatatcgtaagttttacctgctatgccttcatataatacaatactgggtatactaacaacattcaggcctcatcgctgggaaatatcaacattccattcctgcgctccatctacctcgcttgcaaaggtatgtcaccatttagtaaagcccagacgaactaatccaactaactgcaaactgctaggtgacaacgctctactagagtacgagctccgaaccgcaaacaagaaaaaggaaccccgtacagaagtggaagcgattaaccgagaatgtctcgaccacttccgtatctacttcccatcagaccagaccgttcgagccgtgcacagcaatcccaaatactctatcggcacgatatgcctcaatccagcctggtggtcgggtgccaatttcccgcgggacaaagttcgagactgtgtgagcgagcgcggagtcttgatgcataacaaggtgagtacttccgcggtgccagactagtatatcgattttttactaatacacaatccttccgacatatagattgcctttgtccacccttccaccccgatcgatatgcccgataacaaggagtgccgggggtgggcttatgtggggagtgcgaatttgtcagagagtgcatggtgcgtacatatctatactccactcgctgtaatgacaaaactaacatgaaccaggggtcgtatcgtcaaggatagcaagacgaaacagctgaagataagctgtcgcaactgggaatgcggtgttatcgtgcccatcatcaatgagaagaagactggggagaaagataagggacctgaaacgcatggaaccgccccttcggcttctctcccagtcgagatctttacggataccgttccagttccgattaaagtgcccgctgtcccattgtccgagcacaggaagcctttcttctttggagtttgattcaacctgggatcttgagattgcctttgtttactctacatctgagtcagatcgatgtctacatctgcaagtccagtgagaatctgattttactaatcttggcatgggtatctgggataggagttcggatcgggttacttggttggttcaatgaaacgaatgaatggcaagggagttgaaagctgtatgtattatctagcctttatgctgtgatattcaacgagagcaaacgagagaaacagtgaatgtcctaaaaagcaaagttgtatgattcaatctatgtaatatgtatgtttctaacccaacctgttccgatatatctattatgacgctctatgtaaatgcatggtgacaaaaagaaaagtaaacaaaagaacaatttccaaacttttcaagcctagttctcactcttcttccccatgaacaaccccgtcacgcgatcagtcatcagtccagcaaaaccaaacagcgaagcaagaccaaagctccagcctttcacacgaacggtgtagataaagaaataaaccaaagcccagttaataataacataagcaaggaaaatgccaaagcagcgccacttatccccgatatgaacattcaagttggccatatactgcgcaccatccttgtagggacagtactgacagtcggccgtagcctgggggttaaccagatacccgaccttagcgaaagaatcgacaaagtcacccgcataagcatcacaggtctgtccaggcggggggttgaaatgggtagattccagcgaggcgcagtcaatctggacatctggcagaacagccgagagcacgccgcgcagccaccaggtaaccgggttgacgtagtacatccagtatttccagaagacggggtaagcggcgtagggacggacgataccgttgaagaggttgatcattgtgaagaagaaggggagggtgtttgagatgacggtgaaggagggcgcgaaggcgcagatccactggccccacgatgcctggaagaggaagaaaagcatggtcatgaggaagacgtagccggcgtttgaggagtcggtggggaatccgacggggtagtaccagagcagccagtagatcaggccggagatgatggctgcggggatctcgcagatgatgtttgcggtgcagaaggcgacccagccgtagatgcgggatgggtattcgcgtgcttcccagagggcgcggttgatgtagaatttggggacaatggagttgaggacgatgggcgggatgaggacgattaggaagacggagaacatgcggtcttgcattgaggctacggtgttggagagcatgtagaaggtgaagccgttgaagatgccgatgatgatggagacgaagagtttgccgtagtagtaagaggggtcgcgccagtagttcacgaagaggcgtttcgtgagctgggtggtttgggtcattgttgtggcggcgaattcgtaatgggcggaggcggattcctcgatggggagtttgctgcgctcggtgcggatgtgttcgatttcggcgagcacttcttggttttgctccgagttgcgccattcttcgttccagtcgactagttttccgtcgcggtgggttgctttggcggcggtttcgaggatgaactcggcaacgttctttgatggtgggcagacgaagccgcggtcaccgaagtacttgattatggaggagccgtctttgccgacgggaccgaaatagaaggtgttgccgccggggttgagggcgaggatcatgtcgaattgttggatgatcatggaggagggctggtggattgtgcagacgatggcctggccggcttggcaaagtttcttgaggaagcggacgatggagaatgcggcttgactgtcgagaccggaggtgggctcgtctaggaacagaagcagactaggcttggctgcgagctcgacaccaatggtcacgcgcttcttctgctcgacattgagacaaccgataatggcgtcctggatatcctcgagttcgagaagctcgatgatgcggtccacgtagtccattttctcttggcgcgggacatcgcggggctggcggagaatggctgagaactcaaaggcttcgcggatggtggaagtattgtcgtgtagatccatttgctcgcagaaacccgtgccacgctggaaatcagcacccagcttgtggccatcgacaagcatatcaccagtcacgacacccgtcttctggcgctgggccaaagtattgaggagagtcgtctttccagcaccagaggcacccatcagggcgatcataatgccgggcttggcgtaaccgttgacaccgttgaggagcttgcgtgttccgttgccgtaggggacagtgtattcaacattctgccaggtgaagcagcgctcacttgaggacagtcggttgaaagtggcaccatcatcaggagaggtctggccacgggcaagagcagcgttgtcttttgcgttgacgaccttctcttcatcgttgacggtgctggtctgggcagtgactttcttagcgcgcttggactttttgaagaccagagcaccgcccgcatctccaccaaatgagagagtctcggcagcgatgacagtcaccaggaggtacagtacggtgaaggcaatgacaacaccaaagttacgccatagatggctgcgtgtgaactcaaagttggcggtcaagtactgagctccggtaacagatgattcacccaattccgaacccgtcagagcacagccctggtggttggaatccaccccaggaccctgtgggacaagctgggatggattgcattgcatggtgcgatcggagaattcgtttgtcaagactgcctcgtaactgtacgcgatggggttgacatagaacagccatccgaaccagatcgagtccttgatcagagtctgcttgggaatgacataaccgacgaagataatgagcaggttcagcgcgataccaccgaaacgcaccgcgtcatcgatggtcggagacagcgcagcgaacatgcggtacatggaagtgatgcagaaggtattcgtgtacacgaacaggaagtagatgaagaacttggaagccgagacatcgagaccagtcatgaaatagacgataatcgtgaacgggacgaccatggagaagataaaagggaagtcgacaatgacgcgggcaatggagacagcagaggggcggtagaaagcgtaatccttgtggcgggcgacgataccacgtccagtgacagcaggcatcagctcggtcagttgcatccagccaaggaacagaatcgagaagaacagagcaccgctacgcgagaaagcgccgctggtatccagggactctccgtagaacaaggacgaaacgatgaggccgttagagacaacaatgaagtacttcgtgcacagagaagttttatcgccccagagcagccagaactgtcgctgcacgcaggccgtgacctggcgcacgaacgagacggtgtatggcgacttcttggagacagacttggacttggactgtgcgaccgtggattggaagcggcgggtgtcctcctgcccggtgtcttggagacgtttctcgtacccggagacatcctccaggatacggctgtaggtctggctgttcctgaaggtgttctcgagttcctcggcggtcttcggggtggacgcttcacggccaggctggaactcgcgggcattgggatcgcagagcgaagtaaggaagtcggccgtagtccattgcgcggggcagtgaaagcccaagtcgacgaagtattgtcgtgcttcattggctggtccttggtagagcatgcggccctcgtcaatgactagcaccttgtccatgagctcgtaaatgccctctccggcttggtatagcgtgacgaaggtagtgcgcttgctgacatcggtcatgatgcggagggacttggcgtagtccagtgcggtgctggcatccagaccgcgagtcgagttatcccagcagaccactgaggacttggtggctagggtctctgcgatactcacacgcttgcgctcacctccagagacaccgcgtacatactcgtttccaacaagtgtattcctggtgtgagtgataccgaacatcttcagcagggcatcgatgataatgggaatgctttcccggtcctgcttgcgggttttgttgataagggagaacttgagagtttgccagacagtgagcgaggggaagtgctggtcgtcttccgggttgtagttgacttctccacggaaatgcttgtgctgatcctcggacgagagaccaccataactaacctcgccatggaccccagcaaaagcaccacggtcgttcgcaatcgccttgaggaaggtagtgcaaccagcaccgggacggcctagcaccagcatcatctcaccttcacgcacagtaccgctgaaatcatggattagatcgcgaacaggagggtgcttgccgaaccgcagctgcggcacgaacttgcagacgagattgtacagatccgggccgaaggtgccaattacagcctgggggagagtgcgcacgaaggatgcgccagtctccacgccttgcacggtaaggttcttgaagacgacgccaaccttcttggcgggttcaccggcggtcgtgcggcgctccagatgaccaccaatcaggaagtcactcaggttgaagccgccgtcagcctcgtcctcggtctcctcttcgtccttgcccttttcttcatcgaggcggctggtctgcgattttgggtggcgaatgctcctggtgacagagcgggtgcggttcaggctgagacgggtgagctcgcggcgcatctcttccatgtcctccatcgcaccgctgcgggagacggcattcccggcattctgctctccccagccgccatcttcgtcacttattgacgagctgaatgttgagctgtcggttaaagttgggtcgatgggagcttcggtgtgaaggtgttccgtgggttgtgactctgcatcatggtgataggtctcaccggttgagctggattgttgtctggagggctgagtataggcttgggaatccgaggcgccatacgactgttcagaatggccctccatgtcgggaactgggtggcttctactctccggcaacattcaataacagatgtattatgctatagccaggctaattaaggacaggatatgcacagaaccaagggggaagtaaacgtaaagtaaaaggggcagagttggaagggaaatattcagaagagcaaagagactgcacaccgtttatataaatgtcatagccctagggcatttgtcagtcaggaatacgaatcattccaggacccttggaataactcaaacctcaggtcgaatcataagccagacaatgagtcctgactgaagagctatagtgggctatagtggagtggtggagtgtacatgactcaagttgactaaagttgacggtaaagaattttatttcaagcttccccggagataagccttagctccgtattgagccgatccgggctggtgattggctgtttccggctgctcatggacgttcattggctgttcgacgtgtcattgggcggaatatccattcctatcagtctaggcttatcacgtggagccggcttttatattccgtttcgtctcttttggtttcttatacaccgttataggaggatggattagcaatcgtgcttacgaatctgtttcgtagggataatccgtgtaacctccgtgtaaaaaccatgtaagaaccatgtaagaaccatgtaagaacccccagatatagaacaaagaattggatatcaaaccgggcttgtatattgccgatgtaattcggcgactttccaagatttcattgacccactcggctgaaagcatattccgactaatctgacttcatgtctgatctaaataatatatatggtcttggcttttatattgttgagagttccatcaggttctttttaacatatccttggtagcatcttacacaattgcctttttcaaaaagaaaccctaaatcccaaccttcacacttaacttgcgtccaggggtccccgataagctattatcaaccatgcacctccacgttgctatatcacatgtagacctgcaggctacacctacttttgggcatccatgttgtttatgtatatcgcactccatagaaacctatagaaatgcacgtgcatggtactactacgcgcaatccccactagaagatacggtctggctcgagcaaaagtccaacattggaatactatacaataacttctaacccctacttattttgatcgctacttacgcttagcagcagcttgagcgatccgcttctggatctcttcctttgagaggatcttcacggcgttgttggagaagacatagctgagtccagaccaaagagtggtgccggcaacaaggtacctaaaattggttagcaaaaagaaacaattcaaaagaaaccgcaagtaagaaaaaaaagaaaaaaaaaaaacatacaacagtgaggattcgctggtggtcacccacccaactactaactcaccggcgnnnnnnnnnnnnnnnnnnnnnnnnnnnnnnnnnnnnnnnnnnnnnnnnnnnnnnnnnnnnnnnnnnnnnnnnnnnnnnnnnnnnnnnnnnnnnnnnnnnnnnnnnnnnnnnnnnnnnnnnnnnnnnnnnnnnnnnnnnnnnnnnnnnnnnnnnnnnnnnnnnnnnnnnnnnnnnnnnnnnnnnnnnnnnnnnngcttaagtacggctgagcggacgggaagccctgttttccacaccctatggtcgtatgtaccagaaacagcctcgatgtgtcttaggatggaccatcgaagactgctcccatacacaaaaagaaaaaagacaaaaaagacaaaacaagggtataaaagaaaatatcaaacttactggaatccagtcatagcctcgctcaaatgccacgcactcacaaacgcctcggggaccacaggcagcgcaatcgcactacccaccaacaccagctgtagggcagtattgatcttcgaaatctcagtgggcttgacttccgccgagggaagtgagaaatcccagtaccgggccatggtcttgggctcaggcagcgaaatccaacggtaatagatagccgaaatagccagacccagatcgcgaccgaggatgatcacagcgagccagactgttcgatacgtcaatccatgtccatgtccagataccaaagatcaacacgagtgacttactaggaagagagccattcacggccagacacgcgacaccaatggtcatcaacagcttatcggccatgggatcaatgatcgttccaaccacagtttggaggttataccgccgggcgatgtacccatcgacgagatcggtgatgcctgcgtaagcgaacagggataacgctgctgtgtggtagttgtggactaggagatacccgaccacgggcgcggccagcagccgggagaatgtgagaatgttgggcacagtgtagatattctcgtgggaggttggcaggggaatccgtgatagaataggttttttcttggattcctcgggtctaagctaggttagtcgttggttcgaatggcttatgtcgatttgtatattgaatacatagtttggagtagacctactgttcaggagatttggctgattttgacccggaccatctttgctgggtgaagaatgatggtgcaatcagggttgtctgaagacaacgaggtttcaatctgatgaataattagaatgatataaatgaagaagtcacatacgaccatacctaggtgatcggttcaatgttgactggactgatgtagatatacatcggaatccatctctccgaagagattcagttttgaacacatttgactggacaagaagacgtgcatttttggacagcacttgggatccctgccggctcgcccgaagggacaactgggctgcgtatgagccaatcatggtgacaccaatataaggtgacagcggcaggtgttgttagaaaacaaaaattgacagcgacacgataatcacaagctttcaactagcaatttcagctgtgcatacccggtcgtgttcaggctatgcaatggtgattcggtgcaagtgatagaaagctgtcgccttgcacagttgctggtaaagttgcaaattcaaccccacaccaaattaaaccaagtatcaagctgatagcgcaaggaatgcaaataaacagacacaatgctatatagtacaaacacaatctagggattgttagctggatgtgtcggaattcggggcaacttggctgagcgggacatacatataacagaactccaaatgcagatcagttctaccagtaaatcaacgagctagaaccaagagctctagatcacggtcgcctgatgttagatgaactttggagattgcacctcggcgatgagtttctggccggataaatggtttctccgcccgtctctatatcgcaacttatccttcctgtgggcgtactttttctacattcatctatagaaagaaatatgacaatggatttggctgttaaatcatatcctaaactgatagtatcatctattggttcccgatgccaggagccgcgtcaggggatcatgatcaagcctctgctcacctgatatctgtacctgtgacctagaaccccaggtgatgaaagacacattgaacaaaatgacgacttatgtctaagcagtcagtaaaagaatatatatgttaatctcccacacagatgaattcaaattctcgcatctacgtctagaagaagccttagagccagatggacaagcaagcctgccagaacaaagctgcggtcttatctttgcgtcgccacgatgtcacttacttctatccgaactgggtgtgtctcggactcacgctcgttaactccaatctgcagtgtaccgtcagccaaaggaaaggaacaatcagatccaaatatggcgaatccacgtcttcttatcaaccgtgccctcatctacgagcgccgactacctggtgatgcttatatcaccgcgaatgtccagcgcctccagcatggatattactccagtgatgccgtatcagatggggacgctgaacacgtagattttctcgctattgcattcaccttccattcgccccacactatcgcgcatcgcatcaagtccgccactatcagtgtttcagttcgtggaagccgtgatctttcaagttcaaagttgtacccttttggatatccacccggtaacccacgcttccttatgcatgcgccacatctgctctacggcagtgtttctccagagaccatggagtggacattcagtctggctgggtccctcggaatttcagaacttcccgtcagcgcaagcgtcattccctcggggagcttcaatggtcggtacaagcggtacgagatgatgcgcatccaaggctccgcacgtacgttaaaaagcccatctggcagcgatttcgacgtcgaagctggcagcatcgtttggtccatggaagagaacaatgtccagcgatccggtctgccgcgcgagttcacctttgtcatgttgattcagaaacccacagcaaaaagcaagatttccctgtcgattgacgtcgacccggtcatcgacgcgatgattggcagctacccatcattgctgctgaaactgcctgaataccaacctttgccgcgccggggcgtcaatttccaacaagaagttggacagcggtttgaacctgtggacccggtgcgcgggttcaactttgcagacctcgggagcatgtttgatgagtacatcgccatgccaggaaggaagttcagccgtcaggtatgttcagcaaataaataaaatgaaaccctcaatgcatatgaagtgagccgaaactaataggtacttctctcagatccaaatcccatctgagaccagcgtctctgagaatcaccagggcacctacccaggccagcaagggtctctaaacctaatcccgtaccaacaacaactgcagaaccacaacctggccctgcagagcaataacctcactttgcagaaccacctcttacggacaacccttagaaccctctggactacccagccgagggaagaaacccaatacttcccactcacttcccacgctcatccaacaccaacaccaacaccaacaacctccaccaccccccgagcagctgccatcacaatacctctcaacctgcatctccacatcgaccccgccacaacacacctcaccaacctggcgcggacaagcccaggtccctcccccctaggcccgcgccgcacaccaagcctacggcgcacgcaagcgcgggaattcccaaaggctcctctccacacctaacagagtcgatgatcccacacaggtgcagcagcggcgccgcactctttcatcttgcctcaagggacataggctgtgtgcctaatggatgtatttatatatgactaagcacgtgagcttctttcgtgaccaagaagcaaagaagtcacggtttacttatatatggatgagatcacactggaatatgggggtcgcctaaacctatcgacgctacgatctataactaggaagacttccgcctcagagagagaggtccggaagaagcgcatggaaacaaaaacaaatgactacgccacacctctctttaaagacgctgattttagcgagtggtcggatattcaagaaagtcgactgaggatcgtcccacaactattcagcgctatgaattgtctgcagtatcttccgttttgccattacaatatcatatcaccgagcagactgcagacgagaactccccactcttctggaaattctcgttctatgtggacgtcctatgcacggtacatcatgggattccaccctaggagcgggaataaattcagacaaatcatggaccaacccaacgatatcacggaaacctgggatgctaaaaaaaaccaacgccatatacaaggacagccggaccggccttgtaaatacggccgacgcacgatggagcgccatctgggacagaccaaacggacaacaacacgttaattagcactttagccagatagaagaggtgatacaatatagcatttccgaacatcggtatcacctacactcttctgttgtaacttgttccccattacactactttcgaggatttctcagcctcacttgttttggtgatgctatataagtcaccggattattgtattagcaggttaaatgtttactacctataaagcgagaagctgcaacctgagtgccccacgtcaaccttcctatccctcatatggctttcttggttggcactcctactgtggccctgtgaagatcaattccgacgagtcagatagatcgcttttagtaaatgcgttcgacttgcgagctcctaaagcacaaacgtaagacactgccacccatgcctgggccatattttagacctagcagcagctaggtcttgaagccgaggtgagctagaaggggtactccctggttagtcgctcgacgagcctaggcggagagcaagctgatttgcattctcatgtgtattcttgagacaaggcctctggtttctttggaaaatcatactgatatatcattagttgatgagaattttgaagctgattattggataagagatctatggcccacatgctttcgtgacatctcctattgaaacgtatcgtaagagaagaaggggccctaatccggggcctcttcttgtgattgggctcgccgttcgttgctaccagcacctggttggctgtccccgcaccttgatataaatttgaaggagcgcttttttgatcgacttacaaggacacttccctccaaatcttcttgaggatagttatatgtgaccacgagctactccagacgcgaacttaagtcagtttatctcggatactcattcttcttaataatgtctacttttcacggaagcgattcttccaaggaaccaaatgcctccgactactgcaatgatgctactgctctacctttacgccatcttcaaatgagcgaaactacctccgcctctgacacgtcctcaaactttgcacatatacacccttcgtctataccatctgagacaaaattttgccttccccagttctcagcttatccatgggctccttatctgacaatgccgaaacatccgctcgagatgactgtcgatactcacgcaaacccttctacattcagtggtcaggctgtaaatagcgcgttgtccgacacctggtctacaaataatccgttaacgagagatactcaagtcctgtccgcggagagcactgagccccttagaagcaggtatgtctccaattcatcctttcatagcaaatcgccaactgcctcgtcctaggaatacaaaaagaaacaaccaattcaagtgtggttgggagaattgtaccagctctggaggattcgcatctaagtcctctctcatgcgacatatcgaattgctgcatgtttctccacgtggattcgcatgccctcattgcagaaagtcctttaacaggaaggatcagctccaggcacacagaagcaccgtacatgttggctggggctaactggcgcgtctcaaacgcaggggtagtgtgtcataacttgagttgaagattgattgttcagtactgcaaaattcttatgctagagagggactagtagcaaaacaatgtaccgcacaagtaaaatcgaaattgagttatagtagccacaacaagaacaagcatctttgtctaccagggtcagttctctatgtaaacaatgcagccttctatttgatatcaaagttgtgtgagcgaaggctgtgtatgccaaatatctcaagcaagatatgagagaatgaaagaatatcttgccagattattaggattcctttttgttttacctatttgcacgatggattccatcggtttctacaagaaattacgatactataacaatgactcattgtgcagagcctataatccatactatagacggcgggaatcgagtattcagtacacgcacgtattgataaagccgcacctgccaagaaaggaaaggaagaaacgagtatggaagtaatctttgaccattgaaccagtggccattgaccatggaatgagatgggaatcactaaagcctgccccgtgtgggagtatagaacagagaacagagaatcataccgagcccgcccagaccagacgttggaaaagaaaccgttggacaccgtgatcgtagaagacaaacatacaggcgcggccttggcagcaatagagatataagggtcagagagcaagaggaggaagtagaagagtaggaatcagagtccaaaggtaaaagaagtagtaataaaaaaaatagaaccgttttggggttatcgggttgttgttgcatgacatcgtaaagaataagagaacgccacccacccggattcccagaacagaatcaatagagccaccgaaaggaaaaggagcaaagggggtaaatagaagcaaaacaggaaaagcagaaaagacaaagccacctccgtagaccgtaaagcaaagagaccataaccatatagacacgagtgagccgctgtctggtacatattgtagcaataaacggcgttttcctcccaaacataatagaagcgtagggtctatctccaggcaaacaaaaaaaaaaaaaaaaaacaaagaactcgaaaaaccaaaagaaaagaaaattccgcccggactcccacgctccatggccataagcaacaaagacacggaaaggtatcaagagattagatttgaggttgcgccatttgcggttgcgtcgccgccgtagtcgtccatgtcgacatgggttgcgtggcagcataaggcccagggacgtagtactgggagcgatccgtgttgtagtaggacggatggatgggatttgattcgcgacgaggaacgttaggatcgagaccaggcatatgccgatcgagggctgggtgtgggttttccagctggccggagatgctgaagctgctgcgggagtaggtggccggggtggatggatccatgggggaggtagcatctgttgcctggctgcgcgaggagatggaagagttgcggtaggcggaagggctgtgttccgaggcggatcggttacgttcgttgatcgagctggggagtcccgcattgatgccacctggaatggaggccatgctgtgtgcgctcatcgagtccatgctgccgccgtagggccggaaggagtggtaatcttcctgctttgggggaatggcggtctgtcctgggtttggcaggtacggatttggcgcggatgggctggccatcggcgcgcccatggagtatccctgaatcgggccttgctgcgggggatgtgtcgcggcatacgggctagggtgcatatagaagtcgtttgaaggggtgggcatagcgtaggcgggtggggccatcatctgcgggcgatatccgtatagcgcggcgtgggagggctcctggctctccacggcgttggcctctagctcgtcgatcggagaacggaagctttgtttctgggtgagttcggtgcggggtcggataaaccgtagggaatccaccatggaaggtgggttaaggataccgcgcatcacgtcctccacactgtagtatgagaccaaatggtgggtcacgcccgagactgttacgctcatcgtctttttgactaaccccgagtccttgaagccgtaggaatcaactagagaccccaccaatgcccgttcgagctccgattgatgggacgaacggtccgaaaaaggcgccgagttgggcgatgtcggagaatagccctggctgctgtcatgtcgcggatacggttcgcccggccggccggcgggcactggtcgccgagtggccttcttcatggcgcgcttcttctcccccggaggaaacggcttgtccaactcacggtagaccaggaagttccccagaatgcgactcgggctccaggtgactccatcggtccagcgcttgatgcccgaggcattctcctcatagatgaagacgctcccgctgcgcaccagatggctgcgttcccggtcgtgagggcggcgcgggacatgatgcaagacaccggtcaagcatgcctcgaaaaggattagggcgtcctgcgtggttgcgacatacccggtgaatgtgggctccaacacggcggcggtcccgttcaccatgatgtagtgtagtgaaagagatacaaagccaggtgcgaccccccgggcttttgcgaagtgatatattccccgaacgatccaacggggctcaaaagggcaaaaagaaaaaaaggaaaaagaattaagctaagagatcgaccagggtatggagaagaagaggaggttttgagttgggacccctcagttggagaaattcccagggatcgtgatcagcgagaagcacgggccctcgagtcgagtcagcgagtcaacaggttgcaccgattcgatcaggaaaagatggggatctactcgaaacccgttccacggtttgagttgcggcaattcccaagctttctttttttttgggggatccactgagagaagggagggaagggaataactatgtacctaaacggggaccctggctagttaagcgagagaggggaagtagagaatcagaaaagaaggggggaggtctgagtgataactccacagggaaacatggtacaatgataatcattgattagattatggattatttattggattattattattatattcataagttatataagtgatataagttcaacagaaatatctatgggatagacatcgggagtctaatggctaatgttaatgttaatgttaatctcggagggttgaactacttggtcgaaggatgagcctggagtatcaatgacagatatgacatgcgatattatgttttgagctttattttattttatttaatttatttttattcctttttatttcctgatttattttccattttctggattcggtctagtcgacccagaaaagagaaaaagaaaaaagaaagtggaaaccaaataaatcaaataaaataaaaaggagacggtggaattcggaaagcggagaaatacggagaatgaaacatcaaagtcatgatttcaccaaaccctccgcgaaagcaggtacagtttcacttagttcgagaactgaactagaactagaactatttatataggggcaatcttatcaaatattattgccatgaataatagtatatctacgctctcatataatgagctaacaagcagaatacaaaaagaatagaacaggtcaagatacaatcaccacccccgtgccatgggtgatccggtggagccatggattaggatcggagggtctccgtgacatcgtatacaacatacatacaacataccaaagacaagccagtagattgatgttgtatgtactccgtagtcaacggacttaactcgctgttgagtctgactcatcaaacacctgcctatttggaagagaaagaaagagatcatctgtgtctttcgccaggcagcgtaaagtacagacggcggccgtccccgtcctctgattggccgcccaaccacttcccccacttttctcatcgacgccccatcccagaaaggatcgcctttggtctcagacaacctcaggaacctcaagaggatcccaagggccaatcctccgaagagcgtcatatctcggggcgtaggtctgtgcacgccataccgagctattgaacttgggatgggtcgccgtccaacggcagtcaaggataagatcctcggtctggagcagccagtcagaagcgtcagaagcgggtcgtctgccctcacacccgtggacgggggattttaatataaaaaagaaattccctttctcgacatcttttctcttttttctttttctccgggtccgggtatcggtgacttctggttgggttatccgctgctccatgactggtttcccatttggaccaattccccaacgaagaggacgaggaagaggactgagcgcggccagttcaaggtagatctccgcctggacccgtcgattcggtatacaatctacgtcgtccgtaccataatgtatcccccgtggactatatatataatgttcgggtatcgacccgggtcactaaacccaatcagcatgaacggatgaacagacccggggacaccacgcgtcgcagataagaaacaaaaaaaaagaaaaccaaaaaaaagaaggttaggcttccgggcgagagagttttcggtaacttcacttttactttagtttttttttcctttgtcctctatctcagggcgtgaaagttaagaggggaagagggtcccgtaaccaatgcagaccaagaaatgacgactggggttggattggacggccaaaactttcgcgggagatcctcagcagatccaggccatgccacgctgccacgcacaaagtccagacacgggtctcagccacggggccacctgtctggctacgcaccccggtcaagccacggggctaaggattagatcggcgggcgattgagggaattattcagtacgagcaacatacatcggacataggacaggaagttgatccattgtatattgtacatagatagcggaggacagtgctccgtttaaagtcaggtcccagaggagtggtcggccacgcttgttgaaactcaattggcgcgaatgacagatgtcaggatataaacatttagtgtcgagatataagatagggctcgctaaaataagccagtacgtacgcaatgtgatgtatcactccgtataatcgccgaagtccgatagcataagaataggagaaaccaataattcagaaaccaaagcctggaccgaaatctgagatcatcgatattctgcacagcccatcacaagcccaggatggctctaagcgcgggaaggacacagcaaagaggctagcgttggcggttagacgtaacaaaggtacccaatatacgagaacaggaaactatttacatagtgtggtcggagcttggcatttccaatcgaattaccccacaaatgcgcgagcaaatcacattggaaccgagggagcaccagatgtggtcctatcttaaatagacgagaggcgttttttccacggacgatctcggtgcccattatctttctcgattcgaagatctcgactcataggtcctccgtactccgtactccgtactttcgagtcgatcgctggcctgcgatttgtcgacccacacaaatgcacacacccatacccagacactcggggccaaaagaaggattattagattacatgttttattataggtgggggatgtggaagctaagacgcttgaacgggtaggtgaatagcgattgtaataagcaagctgcatgtcaggtggagttttcgctactgaagaaaaaagaggcgcatctaatttaattccattggcactacatcaacctggacggagtactcagaaatcagctctagacccgttagggctagaatcggcgccgatacgaagatcgccccctcgaactaggcactggatgcccccggctaggagcaggagacacaagcacagcggcagccacacagggaaagaataggcaaatgcacgccccgtgaaggaaaacacaacccgaaataactcgcactaatcgcactagtctcagtggcgtccgtactatgctgtcttggggacgaactaagataatgccgcaactctctcaagggtctagcactaaggggcgatcatcattagggaacttggcgtcgacgaagatccggtttggtccaccgactggatggtttcgggggattgtagctttcacttcggaggctcggggaaactatatattaatctatgtatagttaagattgggtatctatagttatccattctagtcgtagatagatacaaggtacaatgaacctacggagtgcagaagatgtgcatgcctatgcaatgcaccagtatcacacccttccactatgcaccgtgccacaagcacaagtccctacatccaacctcgtacagagatcatgggaaagcacaagggcaatggcaatagacatagacatggactccgtctccgtactacctccctaatccgtccacaaacccgagactgttcgggacctgatcctcttacccgcccaggacaatagcctggcctttctacccctgattctgggtgttgcctattggctgttaagattccacagatattagagaattgttttatagaattgctcatttgctggttctttgcacggtgtggagcagtagtacatcagtagtacagtgctgtacccgacaatcataggacagcacccaaggtatgtggttgaaggtatgacatggcgcacagtggagagaaacaattcgtcgtcagcctcagggttgaatgcgcgatcatggagatcgtctatttattccatttcggggaggattagtggatgctctatccgatcgcgcttgtgtgcatggaacattgaacaaaggactagttctcaggtacgagtactcgtactccgtacatgtactccatccatatccatacggagttctgcgcacggagtctcccgcaggaggcaaaaggcaggcaaaaaacaggcaaagaggcgaatacgcaagacatggataacattatgatgtcgggtcatttgtatagcatagttcaagcatcgcctccacctcgtataatcaacacctcgaccccgtgatcctcgtgtcaaaccagccgatcgggtagaaagaaaacataaacgaggccaatgaagctaaggaagccagtgcatccacttatttccactattagttaatgttggcgtgtcacacacaagggatcgctcacgcccatgtggtcagaaggactgttggaacttggcacccagcgctacggctcgtatctgatttgtgcgagttggatcctgtttttgagcaatcaaggttgttgtattcaagattgtatatgggacattgaagcaggtatatcctacattgtagggattataaagcatgagtaactatgttgcaatctctagttagggctttacttatttagggctcgagtacttgattatgggaaagacatcaattcttggcatctgtatgaatattgcagctatgtataaacagaacgacctttctcggcttccgttttccgctttcttatttcccccttaataatagcgagacttccacaaccgatggtaggaagccgatgtaactagctacaatagttatgggatcaagatgtatcaaaatatcaattgatccactattgaaactaggatggctaaatccagccagataaaatagagctcgagacttccaaaagtagagtgcagagtctgatatgaataccaacagttcctacttcgccaaagtccgtcttaaatgatctaggggtaaagccaagcttataacattgcaactcaattatatgcattaggggaaagtcagttagattgctatacaaagtgttctccgtaccgcaaccttaagacatatggccatgcatcgacatagtggacacctcgccatccaaagcattgggatctatgacatcagtcaaaacccactaacgattttcaagatcttcaacgacgctattgactcattaataaatggcgggctcagggggagctactctaaacctctaggaatgcagtatctaactagcctcggcgattcaccttcttttgtaataattctcgctacggtataccttcctttgacgcacattagaagaatgcgaatgcgaacgtacggagtacatctgactcgggatccactaaatagttctgttcaccgatattgactcaaaaacagggccaaagcgaactacgccgttgtacgcataaagtactctatgatatacggcctcggtctgttgtatgtcgccctaagcactgcggcatacatcgtctctctagcgccgcgcactattatcacaataatactttccatcttgctatgtggagaccaacatggatatcatgcacatctatggagcgtcgccactatcccagcccagctggaacgtgttcccgtccagttcgcaagataagacccagcattctagaaggcaaatcctgacatcttctgccgacccgccatgtgcattcttcacctgcaccttccctgctcagctgccaagccgtcctagaagattgtgctagttggtgcatgaccgtcggcacataactccgtatgtacctagttgcttttgcctcatgcataccacagaatccatacaacatacatgtgcggagtacctacgacaggattttcctatagatctgtaagagcactaatagcagcgacatatgacacacgcaaagaagcgggctagcaagcaaggaaccatccatcccccttacgaacccgagaaacactcacccctcaatagccaaattgtacgtgctctgagaaaaaaaaagacgatgtactccgtactccaacagcgcttgcgaaagaaaaggatgcatcatttcgatagctcgaacgcctctcgccgatccactacagcttacccatcccaacgcgccccgcccttccgccgggtgttaactagcggcgatgagatttgtgatttcgcactcgatatacatcacagtaaccaaccaccaatagaaaaccctcaacaagcgattggcgtaaccgtttgttgggaaaaaaaaaggcaagagaggtgaggtgagatcagatcgcggccaacggcttatgcacgccaccacctctcccatcccatcacagcaccgatcaaagcacagcgtgcatggcgtggtagggacgtgcttgcaaaaaaatcgtgattcgtcatgtacgagacccaattcggtaggtggttgttcgtcacatctggacgaggaatgagattggatggttcggatacgcgctgcaaccaggatcacagatggtggcgcggtggctttttttttgcgcgggcctaagcacctaggtctgtttatttcgagggccaattcggcgatgcagtgcatggatcaggggaggagggatggttcttgttatgctgttgtggcctgattcggtcataggtacctctcctccccgggtttggtatatccctgtcgcgagaactggtgagtgtgtcgttccatatgttcccccttgcttgttttttttaggttgggggtctgattgggcttggtgcttgagggtacgtggctttttatccttgttttttggctttttctcgcgtgttcggttcaaggggaggtggagtacagggtatgttgacgtctgcgttgggttaggtgcgtttttgtagatctatcttggatgcttgtcttggatcggtttatgctttcgatttagctgtgaggttgtttgagacccttttcccaatctggacaggtactttggcactttagtgcggcttgattgatgaagaattgtgaatattccatatgctggataataaatatgcaaagatgcacatcgcagatcaaatagtatacatgttgatattgtacagtcaaagcacatgcgccgagtcccgctatgccaatataccaaagaaaagagagtcctgtcgagtcatgtcgtcatgtccattgcatggaatcaaggagacgaacggatcacatcctcaacagcaaggtcttctccttcgacctccttagggaacccactacccctccgcacatgcatcagcaaccgcaaagcaccaacaggcgtcacgccttcaatgcgcttggccatgccgacactgataggccgcacacgctccaggacctgtcgctcctcgttgctgataccgtgcacctgactgtaatccaaatcccctggcagcagcaagttctcgtcctgttggaaccgctcagccatcttctcctggcgtttcatgtacggcgcatagcggccttcgatagcgacgcgggtgaggatctccggcgcaaatgagaactgggtatatgtcttccccggagactcgataataggaatgagggtgttgatgtcgataccgtccagacacaagatatcgagcgctgagcggatcgaggtatcagagcgcaccttgaagcccttgcgggaccagacagacgacgagagtttcgtgttgccaaggagagtctgtagctcttggatctgcgcttcggtatcggagaagtgacgccaacgcttgtcggagacgacgccggcatcgcgggccatgcgggtcagacgtaggtcggcgttgtcggagcgggtggaaatgcggtattcgcttcgcgtcgtgaacatgcggtagggctctgagacacccttggtaatgaggtcgtcgatcatgactccgatgaagccgtctgaccgggtcagggtgaggggtggtcggttctgcgactcgaggccggcatttgtgcctgcgatgatgccttgtccagtagcttcttcgtagccggtggtgccgttgatttgaccggcaaggtagagaccgctgatcaatttagtctctagggttggtcgcaggttgcgcgggtcgatgtagtcgtattcaacgccgtagccgggctggagcatggttacgttctcaagaccgcggactgttcgcaacatggcgtattgggcgtctgcgggcacagtcattgagatgccgttcgggtatatgacgtcgtttggtgcgaagccttctggctcgagccagatctggtgctgggtcttgtctttgaatcggatgatctttgactccagggagggacagtaccgtggcccgcgcacagtctcacggatgtggatggatttgtccagattggcgcggatgatttcatgggctgcttcgtttgtatgggtcatccaacaggtgagctgaccttcgtcgcccacttcaacagttttgttaagataggagaaagggtgaggcggcgagtcgcctttttgcacttcaagagcgctgaaatcgatggtcttcctatccaaacgaggtggtgtacccgtcttcaaacgtcccagttggaagccagcttctcggagggacttgctgagaccatatgtgggggcttcgcccatgcgtcccgaagggaacacatccattccaatatgaatctcaccccctaggaaagtgcccgtagtgataaccacacgtccagtaggaatgatctccccagattccaaccgcacgccaacaatcttgccctgagcaccgggggtgttctcgatgccttcccgggagagcacaatatcagccaccttgccctccacaatgctcagattttccgtgccagccagctcctccgacatataccgcttgtagagatcgcgatcgatctgcgcacgcggtccccaaacagccgggcctttcgaacggttcaacactcgaaacatgacaccagccttatcaataactcgacccgccacgccgtccattgcatccacctcacgaatcatcgttccctttccaatgccgccgaaactgggattgcacgaacaaacaccgatattctccagcgagggcgtgaccaacgcagtgcgcgcgccggaacgagcagcagcagcgcatgcctcagatccagcatggcctccgccaataacaacaacatcgtatggtctaaacgaaccaattagcaagactcttgatgacaacacggcgaaatcacgaaccgtgtgttatctgtaacagtcgcaagaccgcgaccccgacccataaatgagcggagcccgcggttctgacgcatcagagccaccgaccgtgctcgaaaagccatgatgggatgcaatgcgaatgttaccctaaaactaggtacttcgtacaaactggacgatcaaatcgataaggaaaattgtatcttctcacgtgaccgaccttatacccgttaaccccgggcggtcacacatctgacataagcgcttgcgccatcggccaattgcggggctgttgatgttcagttgtaagctgacctgtggtaagctgacctggactttttctataactagcccctcttcgcattttcgaatcttacctcgcaatccgtgagaaaaacccccaaaatgaaggcatactggtatgacaacattgaggtaagcacacaccaattggccgtacccagctttccaagcatttccaggtacagcccacctcagaagaacaacgctgatgtcatctatctacagggcgaccagcgcgagccgcacgactccggtcgcgccgtgtcagaagacaagctcgcctcgctaggcgtgctatacaagcactgcccgacgatcgatgcggtggacaagatcgcagcggagcgcggataccgcaaccgcgacgaggtctgcgtgtcgcctgcgacaatgggcgccgtgtacgaggagaaggttaagtcgttcttctcggagcatctgcacgaggacgaggagattcggtatattctcgacggggagggatactttgatgtgcgtgggcaggaggacgagtggattcgcatctgtcttgtcaaggaggatatgattgttctccctgcgggaatttatcatcggttcactaccaatgagcagaacgtatgtttcttggctttttgtgttagggaatgggactgacttttcttttgcagtatgttaaggccatgcgtcttttccaagacgagcctaagtggacgccgttgaaccgtggtgcggatgttgatgccaacccgcaccggaagacttacttggagactgttgttagtcctactgcggctgtttagagtcgctttaaaattgagatgcgttatgacggattgcacatatactactgaccgattggaatcggaatttcttgagattgtcttatatctttcgttgcatggtgcttttaactgtacatggggacagcaaacccacagtaaatcaatcgaaaccatacctagtggtaggaacggtcaaccgacactcacttatatcaatggtctgggatgccaggcgtccccaatggcgtactcgccggcatggcaccaggcatatcaaaatggtcactcgtagcaccgccgctctgttgcctcgacatactcgagctgcgcaagccacccatatcaacattaaaactagtcgtgcgcgagccagcaccaagccctaacatgcccccacggaaccgcagcccctccagctcccgagcatgatcgtcggagaaccgcggtggtcctgccacatcggtagaactcacgctgcgcggtggtgccgttgatccagcatccgagtcctccccggtccggacgcctgttctgcccatgcgcggccataggtctggaagtccgacaacttgaactcgaggttcgacgacgcgctcctcgaaccatgcgtggactcgcgcttcgactagttgcgctatcttcggtacatcctgcagtcggctgcgggatccgatgagtgagcgcacggagaggtcgagacggtaatctgggaggaaggagaatgcgacgttgcttttcgggctgcttttcggtgggaggtggtcttccgagcttgtgtgctctccgggaccagggggtcgattccctgcgttgttccctgggtctgatgtggggtgcgctggtaatccatcaggtgtttggagtggttctgggggttcggtcgatgctgggatcaaggatatacaaagtgttcctgagaatctcacaactgaaactgacagcgctactggtataatggcagagcgaggtttgggataattcagaaccatggatgtctcgacagcaatagaaaggttgtcgtcgctaaggtcgacatccagtagcgcctgtagccgtccaccgtcggacatggggtcgtcaacggcgatgatgcggcagttgctgaaaatgggaaactcttcgcccaatgagatatcggtcacatttatctggtctatgaaagatggtttcttctccgggttgttcatggccgccgttagcgagctgaggattgacgaagtgggtgagtccttgagggaatatgctgtctccctatactgagcaattgtctgtgcaatgagcacattgaaccagtccagcgactcgggttgatgtgaggagtgatgcatgcggtgtcggccctgcttgctcgtagggttggtaggaatggcactgtagtatgttttgcggaggatggagcgggtgtttgtagaggtagaaggtacagggcgaagaacattcgacgtggacggtttttctcgtaatgacttttggctatcttgaggggggttatagaccgagctattgcggcggtgtgttgtgcggttcgacatgccccgcgatggagggggaggcgcttcaccaaaaatgaaaaacttgatgaaagcgcctatcagtagtactactgagagttggccgagaaggaacccctgggtaaaggacaagctaatgggtgttagcaagatcatatagtccattccatggacagagggcgtacgaggattgagtcgcgtatggcgcgggctcatctacataattgtcagcatacgattcaaaaacttcgagacaatgtcactcactttgttggagcaccattgtcagcggctgtcgacaattcttgtcacaataccatcccagatgaagatgttccaactttcggatctccgaggcttggccgagatcatatctaatcgatatgccaccctcgaccgcctgcctcgaaagatttaaggaagcgccctaacctatttcggggctagcgtcattagcatctataaaatacgaacacctgttcatcctgtttcagtcttagattgggtcactgattgcgatctgggaatttattagagagcatcatccgactgaaccggtcgatctaactatcagtgcccgttaagtgatcattcaatgctcagggtgtgcccgggtctactcagtagtcaaaaagcggcaagggtgagactaaagtggaaagggaaagccaaaaaaatggcaatgtaagataaattgcagagtttgtaaggctaagtccaaatacaacagcatcgtaataaaagcaacagcttcccccctgggcaacctgattaatcaccctaacgcttcagctgactggtcccatttactcttctgctggtagcttcttgtccttcaagtattcacacgacctcgcggttttactgtccttgttgtaccaatattagcagggcatatcccatctgtgctatgggggttgggggttataatgtctgggttgacctttcatttatactcactttggcttttgttcctgccagtttcggatcgtaccttccaatagttgccttgccttttaaagctcctcgtgatttcctactgagttcctcgtcatttataatcatgggtgatctatgattctattcacatatcgctaactctagctcaacctccgcattactatcccaaacggtactgtaattaaatccgcttgggcactcccagctctgctaaagacttcgtcaagcccaccctgaccaaattgtcaatctccttagtcgtagctacagccatgatccccagcattcccaaggaattcaccccggcctccttattaatcgcacctcgtcttctcggcagcacgataatccacctcttggtaagaatcatattatgcggacagactgccccaggcgctgcagttgccgtatagtccccagccaccttcgtagcctctcgcaacaggtctttgtaagccccgaacaatgcagcaggagtcgtatcgccctcaaaacgtcgataaaaccattcaaaaggaaccttagtctcaggttctccgggagaatccaggaaagcagcaaagctgttcgccggcaggggcatcacctgcatatgcttatgcaggcgactgcatccgccgttctggccgcagttgtaaaatgcaacataatcgctttctgcggagctgaggagctgccacgcgtcttctagatcgacctgctcgagcgcctcatattgtcgtttgtgtccatcaaacgtgagaagcatgagatggggccgagcaaagcagaacttgttcacgatcactaagtggctatctagcgcgccgagctcaaacccggtcgtgcttatgtcgctgcctggtcgcttttcggggtttgggatgccggcctctggttgggactgggggctggttagggtgggttttttggcgagagcagaagtcagaacgaattggaacttggtacgttagtggatgtttggtttggattatggttggatgtaatgtactttgaggtcgccgtcaatgtgctcgatgatttgttgtttgtcgtcgtataggacgaggccagattggacgaggttgtcgaatttggcgaggatgaggggttcttccattttgactgttctgtgaattgtgttagacgcaagtgtattctaatattttatggagattgggtagaaattcggtgggagcagcctatttatagtctctacagattgcgtgcacgtccgggatcttgatagtgggattaccattgtttttagggtcacgacaatgggtttttttgccagacagaaaattagtaactagttaataagtaactagttagttatgtagttacggggaatgcgaccccctgcccgagattttaggcatcagctatctctgctgtttcttgaatcttccgccagcaggtttaaattcctgtttacatagaaaaaaatgcaccattctgctcacaatttcatgcttctcacttcaattttattgcccagaatctataagctatgtattgaaggccttgaatacaagaagcccccctcaacttattatgacgtattaggtcacgtgccgcatcacgtacaaggtgggaagaataactacgttaagatagagagaaagaagaagaaagttgcaaacttagaaccctcccgcttagcaatctagcaaacatataaatagcaataagcaagcaaacataaatcgtaggaaaagcggccaggaaagcggtaaacatttatattagttaggcggtcagtcgctgcccgaactatccggcaggagtcccatcggccaaaagggggtcggaacaactatagggggggagggcgccctgatacaataccctaattaaatgcaatcggtaatccaccctagttatggcgtaattgtaagaagttgggctgcgaaatagtcattcgcctcacaatttcaggagatcatcgaatcatctttcttccaatgcctcatcaatccttccagttagccccgcgtcgtcggtcacatcaatggcgatgaagtcatcccgagtgtaagaatacgcctgattttggagccagtgtcccagttgatcaaggataactagacgtatatcaagtgctttgatggcctcgtatgcccactggtggccaaatgatcctttggcgatatcggacgccgaacgcgcacctaccatgacaatcttgcgtcgagctggcttagtcggaattatccaatcaaaagacagtcgaaccttcaagtgttcctctagcatcttcgggatcaatatcggaagctacttcataaggaatgccccgggagaagaaggcaaaaaatataggagagacttgtccccttgagccggaatcggcgcaaagccactgtccggactcgacaaccgaacgaccgagttcacgtattcgagatcccgcaacctcaagtcgagaatatcgctcccgcagagatacccaccatgaggaactagaatcaccttcgttgccacttcgacctcgtcgccggatgcttggattgtgcggacgggatattcgatcggtgcctgcggtggacagaatccgaccaccttcagtggaatttgtggaagaaattctcaagaacagatcaagactatgaaagaagcccggtgtcttcactgtcagtttgaaccgccagcgacaggaaaactttgcaggggctaccgtgacgcaccttcgctgctactcgagtccataggtgctgtttgcctgggtgcttgcaggcagtctcaggcatttgggacctgggagaaactttgtaacctcccgcggtctccacaacgcttaactatatttagtggagtcctcgtggaggctcaattaatttcttttttttttctttgtgcagctgttgccatggtatacctgtcgtacgccataggcacagaatggcaacttcaaatatcgcagtggacacatggcaatatcccataggtgtattctactgcattgcatcccacccctgtcttgcccaaaacgcgcagtgcgtgaaatgaaaaaaatccttcagcacttcgtccgataatgattccaacttgatgcggtaaagcccacattgcaagcggataaatatagtagaatcctttcgtgggataatctatttggcttcgaggggccggcctgcaaatcatgtaccattatacttatgtataataattgtcttccaagccagataaagctgcacgtaattcctaacgatactattcaagcattcaccccattgcctgtgtggggaacaaggatataggttaaggtaacttgttttagtgctcgagtattactatgtcgtaaaatcagaccagcctcaagagtagtaattctaaatatatagagaatttccagggagtgagaagtggtccccccacatatacatattgtagatctgtgaactcctgctacgaaagggatgcgttcgttcctccgcccagcttaccttttaagttatgatcatgtaggcgctaacaatggaactttccagttgacaactagtttgttttctttcttctgttatatcttttggaaacaatataggctatttcaccactggaccataacaaaaaccaaggtacatacttatttagggcttagtgggaccagatatgtcctacttcttgtttgaccatgcattttataaagagtttaggattctgagaatgagaccgactttgacaagacccatcactagtaaaaagatcaccccaaaaatttactaaagtcgagtcgtagaacagtagaaagctgaaatcaaccaccttccatcatgccacggaaaatgagggggtttctacagcgccacgtcaaagaataagagtgaaatgaccatcgcatgattcaattcgcagcttatcagtgatgtgctaccctcgaccgcttctgaaactttaaggaagcgtccctatctatgtaatcaggtcctagcgtcagcgtatataaactatgtatgtacaccataagtaccccgtacaataatatagtacttgtggacctaaggtagatagcgggctgagtcggcagtgacataggctataccatggcatccattaagcctaggtgattcatcaccacgcaattgtaggggtatcaaactggccgccatacgcgctctcagctcaacctatcgtcaataattgtgcctcataatggtgttaatacgaggtttatccaccaatctcattatgacacgccccgtggacacccgtggacacccgtggacccctagcatattgctatttcgagttgtttgatagtgatcagctgcggggtaaaacatgcaagtcgagccatttggaatgttttctacccagtgttattagaaatcctagcctcgttcgatctcgggaggctataaagtcacagttatagcccacttttaattgcttctcacacaaaaagtctcaagtttttactctacataagccaatactcagtcacgctcttatcaatcctctttacctcattactaaaggttattcattagaatgtacttatcacccccggggaatgacattccttgtggattggacttatggtttatctaggtgtaccactaccataaccactaaaacggtgaccaaagtcgatgggagtacaacgaacacaacaaccacgaaaatagcagattgtggagttgctacttgcaggacgtcggcgtcttacctaggttgagctgtatgtctatatctatgaagatcacgttcagcaaaaatgtcccaactaattcaacgaaagcatagatcgggctgttcgacatcggacgaggtgtaacttgatcgagcacgcacttgaatgaagttggtgtacaagcttgcgcactgacgccgggggatgtgatatataaatcatatgactcagctatctttacgctacataggctacatagttaggtggttcattcattgacgataatctaaccaaggtcactttctcaatcacttgtagttctaatctattctccataaagaatcttcgaagcagtcgccaatggtagtcgatgaatggaagcaagtccagatgtgacaggagtgacttacttttgttagtggtctacatacaagtgtaggtacctggtctggtgtcttgcttctataaagcggtggcattagccctaagaaatcagaaaagggggtcaccaaattcgtattattgcaccccgcatcctcaccgcctctatatcgatgtagtcaataatcaatttggatcttcctccccttctgttatcatctcctgtgcgcatacattaaatcatcatgagtttcgtggaccaagctagtcctaagaatgagatcaagtttgagcaaaaaccactgataaaatcactccaagacttgaatatagtcgagtcgtggaaagatggaaagctgaaatccactaccttctaccatgtcaccgaaaacgaggaggttttctttggctacacctcaaagaacaagcgtgagacgagcatcccagaattcaattcagctctgcagcgcgtccaggatcaagatatttatccaacaattcccgccgacacccacttgacacttgcaccggaaggattaagcgcttcgtcagtttacgtgaaacgaccaggcctacagtggtacgaggaaatgattggcacagattatctccccaaggctgttctcgacgagacaatggtgatggagcaaatctcacaatcgcctcacgaaaacataattcgatattacggctgtcgggtgagacgtggttacatcacgtcgattgtgctggagcggcttgaccaaaccctgagccagtatgtcacgacgtccgattttcaagagctcgacaaagtcaagtttttcgaatcgctcaagtcggccgtggagcacctgcacaccttggggctggctcataacgatatcaacccggataacattatggtgaagaatgggtcgccggtgttaattgactttgattcctgtcagccttttgggaaacggttgcagtctttaggtacggagggatggtatgaagaggtgttttatacttctgagaagaaacatgacatatattcccttgagaaattacaggaatggcttcaggctgctaagtgatgttagaaaaagtcatgtctcgatacaatatatagctattaggatatttcttattctctattgtattgtttgtacagaactaattgagaacatagtacggattatatatggaaatgtttgcagagaaaaagacatggtcaaagattctaactatgggaactgaagtaaattacataaatacgaatagttggtcacatttgctacctctatattaagacaaatataatctagttggctaaatcgtagttttttatatatttttatagatatcttctctccttgttgagtcttttgtcatctacctacgacaaaaaaaaaaggttggtatagataatgcaaacagagcaaacaagctagattattccactccacttctacttaactgaaggacacgaaacccttaaaataatcgccacttgttgactcacaggctacagcattggggcctaatctctgatatcgtgcttacaactaatcactacctcggaatcaatctcaaccaatactcctccaggcatagatcctaaaccacaagctagagagctgtcagctctcaaccatccaaccatgcacattctccccaagctggcaatcacagccttactcctcatctcaccagcaacatgcctctcaagctccaaaccaccaggcaaagacgccatccttctatcaaacgtgcaaaccctcacactccgcgcccaccgcatgaccaccgcacggcgcgtctcaccaatcccccaactcagctgcgcaggcccctcaaaacaaacgtgtaacctctaccaaccagaaacaatgcgctgcacaaaccaaggctacgactacgacgtcgaagacgtgcagtggacatgcaccgcagacatgccggcagagttcaagctcggcgcaacagatgtcatctgcgagggataccgcaatgccgatgataagtgggtgttgaaggggagctgtggggttgagtaccggctgctcttgaccgaggctggcgagaagaggtttgggaagagaaacatggattcggagtggggcgggagccagtccgggactggggttcagacgatcatggagatgctggggaacctgattttctttgggttcatcgctgctgttttcattctgatattcttgcctatcttggcgcagtgtttcgggtgggggaatcggcgaggcgggcgggcggggcagccaccggggtggggcgggttctggggaggtggtggtggtggtgnnnnnnnnnnnnnnnnnnnnnnnnnnnnnnnnntctggggaggtggtggtggtggtggacctggcggaaatgaccctccgcctccgtacagcagtttcgatccttataaatcttctgctcgtcagggctggacgccgggtttctggactggtgcgctaggcggtggtgcggctggttatcagatgggcagacgggcttacagtggatcgcgcggcaggtctgatggatatgaccccggtgaaggcagctcgcgctcgccgcagttctcatctaccactgctagtactgggttcgggtcgacgaggcgtaggtgaacatatggacatgccatttacgtatgtcttgcttcgctcgtctttgctaccaacttggggagaagagataccaaaagacagacagaatttaacgaagtcacaaatcaattagcgaatcaaacagcctttaaccccgggcttgatcaatgtgtatcctataatcccactcagaacgccgtaaccaataatctttcacttcataaattgtgcattataatccccgacttaagccgtgggaaagtcatcgattgatcccagaacctcctctgtaccgcctccctggttcttcacacccgccttcttgcgcgacttcttcacggtcgtgttgtcgttcttgacatccttggaatcgctagtcgggttgcgcagcatttcctcttgcatttccttctccttagcgtgctggtcctcaatccgcttcttttcatcgtcaagttcctgctggacaagcttgggatcatcgtaaacagtgttggtcatctctgagtaggttgcgatgtcgatagtctcagaaggtcccatcaaggtgtctttgattcgttgcggatcacggcgttcttcattgttaaactttaacttgatctgacgacgagagcgacccgggaacattttgctgataaccatgaaatcggtaccgaacatgcggagaccgcgataaaacagttctgtcatatcttcatcccacgcttccgtctttgtacgtttgccgtacgaggcctgattaatcttccgggtgaatgagctttccaccacatcttcgaggtcaccggcggctctggcagcatccgcatgacgatcgacctgcaaggacgtattatccagcacgatctcaccgttaacgattcgcattatagggccactttggggtttccagtcgactggctgttcggttttctcttgttcaggctcagtctgcttgacgggcgttcctgttcccggcccaggggttccgccctgcttcttccgttcttcttcggccttatcaatcttgcgtagctctgtctcgcgtttggacttctttccagttctaagatctttgcaaagttcggacattttcacaacattcggcaaaatttctactgtttctgcgccatccggggttggttcgcgcttcttgcgggtgcgctttggtttctcactaccctcaggatcagaggtaccggtctttgagtactttcgtttccttggcttggttggatcgggagtcgaaaggttggattcaccggccgttgcacttgaatcttcgatggtaggcacgattgactgagagcctcgacgacttgcccctacggatacggacttctttcgagctgggaccgcagtgactgtagttgataaagttcgagcgcgttttgctggtcgaccctcgactggggcaggttgttcagtttctggttgagattgcggcagagcttcatttgaatcgacaagggtttctgcggcccgcgctgtttcaatcctagcgtactctaaaagagcgttctctggtccatgatcctcagatacaggttgagcctcactagtcgggacatttgcgggaggtggggtcggctgggtggaaggaggggtaggtggagcagtcaagacaggcgcgggttgcgagatagagatagaggctttgcgtttctgtgggagaggaatcgcagctggcttaggaatttgagtcggccttgagattgtagtcggcttagggatcggagtcggctttgcgatgggtgtagcagtaggtgtgacagtctgtgtaacgatgggagcggtgatagcagcagtagtagtaatcgaaggagtgactgcagcgttcaaagcaatgggcgtttgttccgtgataggcgcagctaccgacgcaggtgaggatgctgtgactgcccgcggctcctgttctgcatccacagagggcgtcagatcagaggaagctacatctttagctttatcttcctgaacgggctcagctggtgacggttgggcaacactaggtcgtctcgcgggcgcggcggcgggcgcacggcggataggcgccttcggagcgaatttcttgccggttttatctatcaaacgcacggtcagagattgcatacttattcttctggtccatatatactcactgattgcagaactggagaaggacttcatggctgcccattgctataaggtgtggattgatgaagatcataaaaagttccaggccggggaagtgggcgaggatcacgtgatggcactagcggacgctaaacctcgttgaaaatcctcctgtcttcaactcctcgatctctgccatcccaccccttctattgtctgcccgcccgctctcccttcacttccacttctttcgatttctttcgctatttattttatcttctaccggactctccttcgacaggattgacacagtctcgagatctgcgtctggctgactgacggacggtccggtggtgataatagccctcccatgctagtctagccactgatgccggccgtcgaaccccccgtcaagtcttcagagtccggtcttatcaaaatggaagaccggaagaggcccgctgcggaccataatgactcagccccgccgttaaagaaacaggctaccaccgttaacggtggtagtaagcctcatcctgatgccgacatgccatggaaagatgatttggaagtatgttttggttcttccgcgatctggagattggcttttggtctcctattgggtatatgctaattgggcattttgcgatagcgatttcaaaaagaagcgattttgcgccagatgcaagagtacaagcgggagaaatcctcactggaatcacgcttgagccagatgtcaaaggctgctacgtttcataatgatcatcttcgtgttatcgatttgtggttcaaacaggtagctttccccattgtttgtgccggtcacttggcatgaatttgggagcaggaactaacgctagtatagctgattgatgaagtgaaattgctacttgggccaccgcaagcagaagaccaaggtcagtccccttgttctagccccacaccccacccactattccaatattgacaatattcgcagaaaccccttttaaaagctccttgcagtttgaagacgttgaagagtttgagacgcatttgaaatcgcggtcggaggatattcacgcaataatttctcaagttcagtccaagtctaatgatgcgcctatcgaaatttcagaggtacagactcgccttgcaaagaagttggccgaggagaaagtgacgatcgccgaactcgaaaaaaccttggccgagaagcaacagttggaggaaagccttgaggaagcctccctgcgatatttggtagctgaaaagaaactggatcgtgcgaagagtctgactgttgcaaaattggaaaagcagcagtctatgggtattcaacgacctggggaaacgtcacaatcaaagcgcgaaggatcgaccccgaccaatggaacccccgccggagaccgcaaccccgaattggaagaagccaataacaagctcactgcaatttcggagacacagaaggagcaagtccggaaactcgaagccgaaaatgccagtttactaggccaaatcaccgaaatcaaagtcaaggttggattcacctcgttacgttgtcattttgtcgctcacatcgggatcctagtcttcaaagttcaccgatgacgattacgcccatacggatttgtttaaacaccttcgatcacagtacgacgatgtagttaagcgaatcaaccatctggaagcgacaaatgttcaacttcgtgaggaagcagagaaataccgctcggaaagaatcgcatacaagatccaggttgaagatgaaacacaaagtacgattgccgagaaggaagctcagctgatgagggctgaaacggacctggctcggatacggaatgcccgcgacgaacttttagccgaccaacagatgcgaaaggccgcgcaagatcagaagaagacttctagtctgaaactgcaagaactagcagacgctagagaggctcgaattacagctttagagtcagagagtcaaaggttgcggctgcagattgagggctccaagtccgacgacaatatcaacgatatgccgctagaggagcttcgcgccaagtacaccagcctagaacgccagtactccatgctcaacaccgagttgacatcgatgcagacggcctacacgaagtttgctactctcgcatcgcagaaagttaccgactttgcggctatggaagagagggttgcaaggctgacggcggagaagtctaaagcagatcagaagttctttgctgcaatgaaaagcaaagaagcacgggatgtcgaagtgcgaacgcttagaatgcaaagctccaaaacgtcggatattgtggcccagctgaaggagtccgaagcagctactcggtcattagtgtccaacatggacaagcaagccaatgagaccaaggaggcactaaattcagccctgagcaagcaccgcgcccttcagcaacagttgaccgagagcaatattctcatggaaggcttgaaacatcaggtttctgagctcaaagggctttcaacatccaaggactcgacactggcaagcaccacttctgctttgcggcaagctgagacagaggtcgctggtttgaaacagtccctttcagataccaagaagagtctggacaactggaagaccaagagtcttggcaattcatcctcggaatatgaaatgctgcgggtatgttgaattttcacatttgttaatgaatcagagctaactacgttcagacacttgcactgtgtacggtgtgtcgtcgcaatttcaaaaatacggtgatcaagacatgtggccatgttttctgcaaagattgcgtcgcagagcgtctcacgtcgcgctcccgcaagtgcccgaactgcggcaaatctttcggaagcaacgaccacatgcacattaccctctgatcgaccttcgaatcccttgtattatattttcctttcgatgcttttcctctttacgtcttatctctttttagtatgtcacatccggacaggttcatggtgtggtgtttttttgtgtgtgtgtctgtggtttagcaggtctggtttgggtcggcgtttgacgagttatgcaccctcaaccctaactcggggcttgttttagttccttttcctctttttcccattacaaaccaaagcaatggtgggtttctcaaggcgcaggggcgtcgttcttcatcctctctggacgagaggccggcgcacactgattttctcagaggctgagctattctagatttctgtgtcatgtaggactaccgtgtacggagcagaaaaagtacaaacttgacgaatgcaatgtgagattttccataccccaatgacttgattgtcttctattataaagattcttgatattctcattctcatgagttaaagatccgactatacaacaactcatgcctcccaacccaaagatccagcgcagggacaacctgcccagcctgctcaacaggcgtattccattcccgcgcaatgcgcttcatcatcgtatcctgcaacccctgactagccaacacattctgcgcctggtaagggcccataacacccgctctgacagccgcactcaggaccgccttagcatgattcataacaaagacatacgccgtctgctgcaagtcgagacccatagcccgacagaccacaccccagagcggagcaaagtggcccttgggcccgagatcctcgtcctcctcgagacaagacttcaacgcatcggacaaatcatcgatagcagtggcggcgaccgcggtatctcccgaagccgggttctcaggcctcgcgaagctgactctaaatgcgcgctcccaaacaccgatgagggcgcggccttgggcgatacttgcacgctgcgcgacaatgcacggcgttgatgcgtccaggtcgttatctagtgtgtcgagggttgaaggttgccggtatccggctagcacgtaggggagggatgtgcttgcgattgaggcgatggagagtttgaggaagcggtggaaagaggttattggggcggtgcgagcaggtttgttatgagctagataggactctagtccgctagagtaggcgaaggagcctagtgggagggcggagtctgagaggaggaggagggcgtgaagagatgcgctggaggtggtaggtttattattggtattatattgttctaggaggggttagcttaggtatgcgacattggaggtttggatttgcctacctttaggggcccatgaggagggtgggctggggtattcggaggctgctagttgagcacgggcatcttgcaggcgcgactccaagagaatgacctcggcttcgaggtcttgggtgtcttggatcagcatagtgtagctatcaaatatgtggtagagtatcgtatatgtagtatgtacaaagtacagatttaaaaagtaatgttatctggatcggagggtgtcgaggtcttatagaagctgatcggcaaaacgaaaagcggaggccgccgcacttctccgtatcagcttgactgtttcacattattaactgtttttggacttggacattaattactatctcgctgatctcttttgccctgttttccccgcgtcatgaactaaagtcaatctccacaaccatgtcaggcaagcgtctgctcgacgccatccaattcctcaatgtgtcgaaaaccatcgcagccaaacacctggccatccgacaacatcagctagatgtctacacacgcacatcctccttgaccaagggtatcaaggcccaagcagagggtctgatcctaactgctcaagccgccgccgcattggcacgccgatttgacgagccatctccgccgagcccggcaaacgtccccgacaagcctcccgccagcactgcaacaccacctccggacctcgcccgcaaattgcaacgtcaagccgaatcgcaaatcccgtcttcggtggcaacatacagcatctatgagcaaccaagcgctctggttgcgagcaagcagcaggatgtcttctatgagccatcgcttcggtcggagccggatctctcgggcctaccgagagtgaaagtacccaaggccgcaagcgatgctcaagttggtagcgatggattgaacgcggatgtcttccactcgcctattgaatctagtaagcctgctccggttgagcatgagatgcccgaggagatggtccaaggtcttttccatagcccgaaagtgtcgcgcatgatctccggacagccgccgccgaagagggactggaagctggccgcgaagcctcagcagccggtcgtggatgctgctaagcctgtatccccggtgactccgaaatccgaggctcaggagatggaggagcttgcagctagcgtcgccgaagacgtggtgcctagtactaataccgtcggcgagaccaaggagccaaaagcgtaccagatgctggagtcgcgcgtgccgtcctctcgactaggcagactctggcagtacggtggtctagcgacctcaatggcatttggcgctgtcggagagggtttgcggcgagccactggcagtcaggacaatggatctattatgttcagtgctggtaacatggagcgaatggtagccaagctgtcaaaaatgcgtggcgcagctctcaagctgggacagatgctgagtattcaaggtacgttgcattgtctagctcactggtatcaataatgctcatgcaattgctagactccaacatgctccccgaaccaattcagcaagtcctccaacgcgtgcaagatcgcgcagactacatgcccgcctcgcagcgtgacaaggtacttaccgacaacctcggacccaactggcgcgaccttttcagcactttcaacgaaatccctatggcagctgcctcaatcggccaagtgcactcagccgttctcaaaagcaccggccaaccagttgccgtaaaagttcaatacccaggcgtcgccgactcaatcgacagtgacctgagcaacctctcaattcttctaacagcctcccgtctcctccctaagggactgtaccttgacaaaacaatcgcaaacgcgcgcaccgagctagcttgggaatgcgactacgtccgtgaagccaaagccgccgagcacttccgcgggctcttagccggcgactcagtcttcatcgttcccgagataatcgcccacgcctccggcaaacaagtcctaacaatggaaatgctggatggcgtagccgtgaccaaagtaactgacttcacccaagcccaacgcgactggatcggcacacaaataatgcgcctctgcctccgcgagatcaccgaattccactacatgcaaaccgacccgaactggacaaacttcctctacaactcgtcgacgaacaaacttgaactcctcgacttcggcgcctcgcgcgcctaccccgaggaattcataacaacctacgtgcgcacgctagtcgccgcctcccgcaacgatcgccgatcctgcaaagacctctctatcgagctggggtacctgacaggaatggaatcgcaggcgatggtcgacgcgcacgtgagctcgatcataacgatcgcggagccgttcatgctttcctcgccggatctgtacgatttcagtaaccagacgatcacggaccgcgtgcgcacacttattccggttatgattcgggagaggctggcgccgccgcctgaggaaacgtactctctgcatcgtaaactgagtggggctttcttgctttgtgctagacttggtagctccgtgccctgtaaggctttgtttagtgaagctgttgaggcggcgcagcggaatgggctaaaggtggagtagagagatgtggttatgtactattatagactctgtataactgtatactatatagtcagggaatgaatcctggattattttggttatgtcaagtatcaaaaggatccaggttgtctcgtaaagttaagtttgccctaataagtgccaagagcgcctcccgcacgcggctcaacaagacatgatggatttaatctatctccacaccatacaagatctaagctacgattaaagactcgggcaataatatccttcggtgaaaaagatttgatgaaactagcatactctattctttcggtaccaaaacaaaggaacgatatcatccttaactagaagcattgaagttatccaggaccgcgtcgtccttgatagtttcccaaataccgtcaattcgtctcacaactccctcttcaagaggacccttccgcagaatagccagggtgttcttcagttgagacacactactagcacccaccacaacagcatcgccgagcgcactttggatttgagagtggaaagcgacccagcggtaggccaactcagccttcgaaactcccgagtccttggacagttgatcccagagatcaagcgcctccaacaagctgggggtattgtacagcctattgtacaattgacctataggggtgctggaatcccagcgaccttgtccgccgttgagaagtgcctccttcgacttcgtgaggaaaccgcccgcaatagggctatatgcgtagaaccgaatattgtggcggcgcaggacggggaacagttcggtctcgatcaggcgcgagatggcattataattcccttggtagaccgaaggaaggacgtaacccttttccttgcagatgcggataacctcctcgacttcgtcagcgcggaagttcgacagcccaaagtagtggaacttgtgtgcttggtagagctcattgatagcggcaagggtctcttctagaggaactttgcgatcaggcgcgtggaggtaaaagatgttgacctaagaccattatcgtcagcatcggttccctacagtttgcggattgggatttcctgcacatacactgttcgtgttcagcttccggaggctctcgttggctctttcgatcaccagttctttggaagacgttccaggcacgaagccaccagcgtgcttggtatcgacgataaagcgggaagcggcacctgtttggcctaagagctcttcacttcctctatatatctgggcagtatcgatgtccttcacaccattctcctcaaggacacggaggacttcttccacctgcgccggggtggaaaagtcactagaagcgccgagaagggcgcccccatataccacctttacttgtttgtcggccattgaatagatatgaacgaaaaagggattgcaggacttcaaagtttaatgtgaaagtaatgttgagaaagtgtgataaagacaggctcagatatctatatataccaacacatgcgagataaatcacattagtaatacaatcacaagtgctctaaactcggagactttctatactgctcggtaagcagagttgtcattgaaccgaagccgaaggccgaagtgattcagatctctttgtagcacgtatacaagccctcgttccaccctgaatgcccgtccgcaaatcagaaccgaatattgaagggtgtggatccctttaacgcggccagacggacgggacacggaaagtcgtagggaaaacgggataagcggactttgacggagcgcagccacattttgtccgaacaccccaactcctacccaaaattacatacctccatatgtgagagcccgaaacttcggccgaatattctgtttttcaaggcgcatccactaaagcggccccgtgcatgagaccaactccgttctgatgaaggtactgactacgaaaggaggaagtgatcaaccgtgagtgagaatgatggtagatgacggaagatggggatctaggtactgtcatgaagctctcgatatagcttcgcgctataaatccgccagaagccagaagaaacatctctcagacatacaaaagaagtgccaacgcagcaagctgaacggcaagctgcctgtcggagaagtcaaagaaaagggaaggaatgccacagaaggtctaccaactgtatagggcaacagcgagcacgtcagaatgcatcacgttctgagctcacgggacagacggactctaacggacatgactcggactctctccgacaacgcaattcttgtcataaaccacatctaaaattactcaaactaggtgggtcggagatgaccggaaacgagggcattgtcatgagcatttcattataaataaagacaccatgctaccccaatcgtgcttcagattaatcctcatccttgcaagtcataagttatggttaccaacacccacaaagtatttagaagggatggagcgaccattcgttcccacattgaaccacgtccgcttcatggcccatcagaagtccttgtcaaagtccgcgcggtctctcttaattggaaggatgtggcagtactcgacggtcgatttccctttccagcattggaaaatggcatctctggaactgagtttgccggggaggtcgtatccgttggcaacaaggtgaaatccttcacggtaagttcagtctagggtcggtttgtcaagtccgtggcttctctgactcgtttttattctttaggagggtgaccgagtaacatctttgattgacttggatgctattaccggaagagaaaaaaccgtgcaaggtttgtttgtatctaagcccggtatatatggtataaagtcctaacaagcacaggtctgggccagaatatcgatggaacattagcggagtacctcgttatgccggcggaaagccttgtgaaaattccagatcatctgacgtggcccgaggtaaacattataccagaaaggaagactgtgatttcttggagcagagctgacgaaagaaaataggcgagtatgatcgcgtgcgcaggattgactgcatggtcagctctcaatatgaagagctcgaacctgtgtgggaaaaccgtgcttattgagggtatgaatcagaaaaatcacgccaaccaaaggcacaatggctaaccttacttatgcaggaactggtggtgttagcctcatcgccctcattctcgccgttcgggctggtgcttatgtgattatcacgtcttcatctgacgacaagcttgagaaagcacgaatcctgggagcttcgcataccattaattatgccaagcatagtgactgggagaatgaagtgctcgaacataccggagggctaggtgtggacatcgttgtcgagcagggaggagcggctactctattgaagagtgtctcgacggttaaaaagggtggccaggtgtcccaagttgggctgcttactgcaaatagtgaaggcgatttcgttttgctagtccaacatttgatcatcaaagcttgcaggatcgtgtgagtagtaatccctgtgttcattatatccaatactaaccgagtcagaggtatccaagttgggacgaaggttgacttggaagactttgtcgagcttttgagagtcactcgccttggactgttgccggttatcgatcgaattttcgaatttgaacaagccccggaggcttgtgcatacctgcaaagtggtaaagcttttggcaaagtagttgttcaattctaattgcataacgttctccactctaccagatatatgaaactacacaagaaccgtcgcgacgattgtaaggttccctgtagatagatattctcagataaataaataggtgttattgagactcttatgagaaaaacacaaaatgcctagatttctgtcacctaggttgggatagagtccatgattcgtcgtgccgctagaagttccaaatatatccctggagagacgttagctgaatatcaaaagcaaacgacgtaccgacaagtaagaacataccagcagatttccatttcgcgttgagtttttccaatgctgtttctatgacacccaagcccctcaattgacttgtaataatgaatcttacccctgccaaataaaaccaatgcaatacaaatggcgggatatcaccgtgggttagatccacgctctccgtctccatatattcttcagctacggctagtgcgaaggaggcagcatcattagaaacagcgtttgcacgttcacgaagattcggttcctcatgagaaagatatggggcgtaaagcgttaggagggcgcttttgacaacggttagtcagaatgtataaaatgaattgtaaaaaggaaacagagggccgtcaaaaatgagtaagtgggcatgagagatacctaccaaaatgagattgcagtttggtagcatataatggaataagtcgtgcccgcattagactctgaatacgagattaacgcgtgaagggtcttctccagctggctaacctcttcctttcgaagttcaatgtcaatcgacatataaaggtcatggcgaaggacgcggccaaggagatagccagcttgcacgacgtttgcgtagcgtccgagtgactcgggaggagccgacaatgtggagaacacatttttgtatcctccgtagtcccattccttctcctggcaaggaagctgttctgttaaagcgggctcggaaacaagcaactcctgtcgggggtttcctaggttcgcaattctgggcgagcacaaattaatcaaactgtacatatggggcccgtgccagattaaacaaaccgctcaagcatgaagatagcccaccaggttcttctcctctcttccgcttcaacccatggtgtatcactaataggaccatctaccgagctagtccaaccgatacctaatgcaagagaatatttcaggcagagacctattgatacctgcacggcaggatacatagcgtggccaatctcataaaccgcgaggagaatacaaccctgtagtgtctccatggaaagaataccggcaacttgcatctcagtaaacagccgccttatagtagagtacaatggggtccacgggttgtcgttttgaagagggctgaaaagatccatacatagacacaagaaaacagcatcagtccgcaggggcgacagcggattcagcaattgatcgtaaaccttccgttttgatatgattggcagccatggatgaacacactggtaatagcgagttgctattcgttgtaggccagtattatcacccataaatggtctcacgtaactcgggatgaaattggggacagggagaattgataaccgtgctttacttcgttggaagacttcatggtctaagaaacgacaggccacactggtccgatctcgaggactctgcccgggctgcagcgcaggtggctcctcaacggtaattgcggtggaggaagtggtattctgatcacttattagatcaagtgtgttgtttttgtacgagcagaccctctggtgtctgggaacattagcccgaattttgattggcagtgttctgatgcttaccgtttgcaggcggaacactcgggcgtttccctattgcatttgatcttgcgtttatgacagaagtagcatgcccgctgggcacggatggggtcattggtagcctggtctgacatagtttcgagagtgtcaggcacaacttttaatgtttctcatcatagaacgggggaaggacggaaaggcgggggacacggagaagttgccacccctcacggagaatttccgagatattccgccgggcccgccacagcgagactactctagcaagttcgagcttacgatttgtcagggattcctcatcgatcatgatacacattcgaaaattgttctaatttggctcttgccttgggcttccgcccatatttcagaataggtgcgaattgatgtagttatcgtatttcaccagaccataaggaagaccaagtctctggtctatacgaccttcttaaagtgtagtaacggaagtaaaaagtcatgttttttgcgtaaactatggatccgctagctgccaaagccttgtaggcgacctcgccgagaggatcagactcttgacttaacgatgatgtcggagtatggctaggcgcctctctgccgaattggttgtatcggcgtcgacgggcgttctgagtatcgtctatgcgatctcaccggtaaggggagaattaccctagtcccggcgttgtgacgtgccgggtcttgtcacttgtaagacagaagattgcaaaacaatgcaaactagaaaacaagcaaataggcaaagcaaggcaaatgttggatcgtaataggcgcgatgggttgcgggggcagactgccatcgtcccatgatatgctgactctgccggcgtgcatagtctgcggcgcgcatagcgaacatctagtgatctttcggtctgatatctgctgataacctttttcttcaaggcagagttgcatgatatcttcatatatgaacgaataacggcctggcaaggcactcatctcgaaggcattcattttgagagttgtttgcggtatcgaattgcctttgtagacaatcaaaacgaagaagaacataaggagagaaagagaagagaagagcagagaagaggggctgtttacacagtccctaggtttggccagttttgtgcacgtcccatactccactggatcctcatacactgaagcatatgcaccttggaagggaccccagtctcgtcctataatatatgggctgcggtatcagctcgtccggggaatatcgattgcttcgtcgggctcgatgtcctcggggctgaagatcgttgaccgggttgatttcttttcttgctcgaccttttctttctaggagtgacccgaagagggagagggggttcgagactagagagcggtggtgttacagaaggtaagtggaagagaaggggatcatattgtgtatttacatacatggtcacagatattccagatcagtgaagggagtatcacctgaaggaacaaacagcatgatgagcgggccacgcaccgttcgaggatattgccagataaattgtgcgagtgcgtttgtaaggtggtttttgtttcctgctgtaggttgatttcgtgggacatgagacagtctcttggttaacggcccacatcacctggctccgccattgtttctgatgacaagaaagaaatcgaaggtaagaaaatctttttcgttgcgtatagatattcgttaaatcggctgacacgctcaccgtccgcgaggatgcgactgcggtagcgaaaggcacggcaccagatatcttgcaagatataatggttggtatcaacagccaccgcaggaatatatgaaacatgacgactagatagccatgataatggtatcggacaacccctttcgtttgactgcgagctatgctcgtcttgaggacgcaattggtgataggattgagctcccaaccccatatataggtgtggatgttgcgtatatatgactcatctgttgcatgattctgcgtataccaagattagttaatacttttgaatgagacgatcgatagtatataactcactggtgccatttgaacgaccaggatagagagaatatctctggttgtattatcattattcattgcgtgtcgaggagacgactgtggtaagggattctctagagagagatggaaggattcgctctgcgtgaagtatatttgtagtctcacaagagcggtcggccactcatgcttttccatatataacatgttatgagtgtgtggtcactcattaagaagtatgcccctgatatatatgaaggcaaggttgtagagcgagggtaaagcgaaggtaaagcgaagaaggtaggtgaaggcaatataaaggtggtgtaaagggaatgtgaggacaaagggcaacatgaaagaaatggattgtgaattcaagattcgtggttagcgctaggccgcgcggttgctgttcttttgggttatatatgttttacacaactgcagtctgtctctccaccttacttctcttccttcctccccacctcaccaccagcatcgaggcaaaatgaagctcgcctatccaccgtgggtgagaatatcgacgatatccactcagtcacctggcattacgcaaagtatcatgcgaggctcctcctgagcctcgcatttaagctcctgcccagcgtgtcattcaagctcctgttgttcgccgcgatgcgttcagtggtggttagaatttctgagattgcagcaccctggctatgccaacctcatgattgactgtgagcggatatctcagctgtccatagaccaggatatgtcggatctaatccctccacatgatcaaccgactgatcctgaggagccgatagtaggtgagccagaagatctcccgacccatacggacctggaaggcgagtacgtggctgtaacgaatcttgaaccccacttcgacgaggagacggtacttcgaaatatggtactaggcgccattcccccgcctgagcattctccagttccatcaacgccacgccggcacattatcctaccttctatccgggtcactcccatttctgccgacatgaaccctcggtttcgaatgaaagactgtgtgcaagttatatgtatatctggtccgatttcgaacaacaggcactagaagcttgtaacaattgactttcaccagtcacgtcagcgttacagattcacccgagggtgatttatactttgtcggtagtactggtcgcgaactgtggctagctggctctacgtgcaagtcgatgatacacttcaaaaaagcatccagaacatggcatacctcccagagtttgctgacaccatgttcgacgagatcatgttgatggtgcaaggaagcgacaaagctgagaacgcactcaacgagaccctgaagttcgacaaaatgcgtcgttcagatttcaacacagcgagggacttcatcacagagtaccaaaaacagtaccacgtcctcgcgcgcttcaagatacaacctcaccccttccatacgacaatagccaagccatcctatcgctcacgttcctgacccttttcccatatggtagggcggagattcaatcgtcgagaatccgtactgtcgaattcaaagagtgggcgcagcacctgatgcgccatgagtcgggccgtttcgctcggcaccctcgctttcgttttgtgatctttaatatgattgctccccatttcagtcaattcgacgaatatctatgcgcaacgaaaaatgtttttcttaccttcgatttctttcttgtcatagacaggggaacatgacacttctttcaataatctggagtatctcttaccatgtatgtagctacacaagaagggtgtggctgaacttgccatacataggcctacgcttgctgaactcgagcctggagagattccaacccaattttcaccctcttccaccaaagccccacagccagacatggccagaatcatcgcgtccgatcatcaaacccctcacctgagactggcctagaagaagcggatgtactgatgagtatatgtcagagcgccccccggtctctccaaaagcccctcgagaggaggcagaggccctggcctctgatgaatccacaaggttgtttgtgacggatgaaacgacgcaacatagtaccttagtaagttctatatcttcgaatcaacaaagtattcacaggtggtcgcttatacaaattacagtccaagggaatgtctcggggatgtgcctccctggtcatccgactagccataacttccatgctaccgaagagaacaaatagccaatttcaaccagtcccttgacgctcatacatgcagttactggaaggccgtgaatcggtacgattgtgacatggagaaggcccctcaagaagaactttcaaatgttggagattgtaatgacacaacagaagagatcgccaaagtaatcagcagagatctggtgctttgaaaaagttcactggctaatcatttatgcagaatagaacatagctcagtcaaagcatactacagactactggcggtggtgatggaggttcaatcaccactaaaaattcccattctgagatcaaaagacgtgaaaatacccagcaaaagaggcacaactataaaagatgatatcgagaagcaggaaaagtacatcggcggcgccagaaaccttaaggcacagttccatgacggggagttctccccagatgatgcctcgagatctctcagaactcatattaatgaagcctgcgagtagcccacctggaagaggtctcaaattgccaacagtagtcgtggattctgcgtggtctgggtcattgaccaattgacggaagattccctattctggctgaatgaatcagaccaggaggtcaaaatcgcattaacaacatcacgaatatcatattcggacgggtgttcttaaagacggggtccaaatttacgataatcaggaggccataaggccattctaggagagacttacggcagataagaaactccacgtcgaagagattccaggtcggtgttcactttgacgatgcacagagctaggtaatttggatattggcttacagctggctgatgcacctggtcgcacttaccattgcaagtaaacccagggaaagaagactgggagcaccaatgtgaaatcttcttccttttgatctccgtcaggatctacttataattttcgacaccatgtttcaaattctataatccttcgcactcggaaaagttcgatctcgattgtggcggaagaaggtgcaaggttgtgttcttggcttagtttagggatcgatcctcttccatttgctagctattacattcactagtggattggtcactcagattggccacccagattggccaaatctcaatatttgtctgctggatcagcatcgggttgaggagaaagggttatagaggaccctggacaatgtcgttactctcgatgactttggggacaacaacctagcagaagagaaggccaacagtgtccagcgaatgatcggcactctgggtgtatacatattgtttcgttacagaaatacaatctaattcaaggtcccattgacggtcatgagttgcaggagctcaatagagcttcatatagtagatatacgtgatgtgcaccgtatcgcgtaacacggtgatactctactctcgacggaaaaggcccgggaagtcgcccgttcgatgaatgaagagcaaatcgaactagacaaggtcaagacgtctcagcgcaggacccgaatgaattagatacggacgtatgatatcgttccagagattttattaaattcacaggctaggtatacgctggcatcacacagttgggttggacatgcagatatttgtcgattcaaccttggaagaatgatggtgataagaactatagtggcactaagtgcagtggaattgctggatttagtctgtatattacgtccgctcacttgtgaaaactaaacaatatttcatggtgaaactatctgcttatatcaacttcgtttaaacaatgccaacaacatcgagcgaagagagccaaggcagaacggtctctagcatatctgacatgtgatagcatccagatgtcgaggtcctccttctctttgagaagtggctccattttgtatagtacgaagcttcccaccgtaggcagtccctcgcagtggtctcctgatggagcttgcatacacagctattcttggatatagtcgaagagccgaatatcgaaacggcaaacggctcagatgggaagaagaaggatgggactcacaacctccattcccaccagcagcgacgggctcgtagcggaacctagccttgttagttactcgataccttcaaagtaagatattgggcaaagttgaattgcataaaacttaccacttggcccgaacgttgtcgttttaggatgcagagaagaagggacagcagagtgagacatgaagtgcggaatgagatgagagagaggtgaactcgaaagtcgagtcaatcaggttctgggctgtggaccagaccaactcagaagtcatcacaaaaggcccaagattccccacaatgtctccgagtgacgagcatgatgctcatcgacaaaacccctcaattcatgaatgttatcactccttcatagagactttaaatcgcgataagacaatagacagtggagggaaggttgatggggtggaagtgtgaattgcacgaggagcttctgttgactgtaataatgtttgtgtatctccctgcgatgttcggtgttctaactggagagattcgcaaactccctctgccactgcacaagggtctcagatcacggcttgctgttgtgcgctctcctcggacataacatggtatattgagagttcgcgctatctcccggaagacgccaaaccgaatatcaaatctgtgcgacgatgtgggagctatcgtgggagatttcagaaagaccggtctagttctcagtagttagtggccatattataattgatacctcaaaataggcatcagagcctgactggtcccacttactcttctgcaggtaggtttttatcatttaagcacgatctgggcccccctcctgcatggatacccatctgtcatggctgtgagatgggcgccatgaaacttagcattgagttgtaatcaacttcccatccattcagctcggtcgattgggggtggcggtgattgtagtattcatccatgcaattcgtcggcatgcgactgcattaccaactgaatgcatgaccggcgaaccaattctggtagctagagagatgtagatgacgcacgaggtcattccaatggaggtcggcagctaagaggactatgattgctggcctgcgttgttcttgacatacgccatgaggtcgtggcggaagactcaggacaatcgagtccagcggagatttagtgggtagttctgcgcactctccagaatcctcttcggcttttcctgattgtcacttgcccttgatgtcttcaaaatctgagggtcgcatcattcatcatgtcatttccataattccaagtccataatcccaaccagagctcatgtcgtgcctggttgagcctagctcatggatggttgtaagagaagacacacaaccatcaatgaccaggtatgtctctataatccagacgcacgtagtcccaaactcagaggaccagtcgtttttgtatgttatatccgaattcgacattgtgcaggtaatttccctttcttgccacaaatgacaagagtccaacatgaagtccgcctattggagtttctgcgtctggaggtcggaagcttgaggcgtagagcgctgtatcaatgcctttcggactgatgccgaggcggagcaggtctgtgggtccgcttgctagttatacatgggaatgtacttgaatttggcgcatcgatgatgtaggcgaatagtatatgcctttgaatgatgccgagaggggcagatgtgtggatctgtctttctttgcttgggatcttgtccgcccagcaaggtccagttcagtcggtggccatggtgcgaggcgttccgtgcggtctgcgttttctttttacggtatatttatgccatttccgagctaacgatcagcttttgcacgatgttggcttcggcaagtccgcggtagatctcgccagcttagctcagcctacctgttattgtcgcccctccagtccgtgcctcttgcactggacgacaagagtttcttggctcgcatttgtccggcctggtactggtacgtatgtagatctgagtagccacgctgtccagattggttgctaagtcggtctatggaaaaggaagacaaagcgaaaggataatcctgaggccgaaggtcggtatatagtcgaaaggccaaggagaaggacacggatgcgatcaacgtgcaagctgaggttgttgttgcgccaaacttcgttctgacctcatagggagaggtgggggcagaggcaggctgcctatatatcttgatctctcaacaatatataattatgaagtctgtgatgatgcctgttagtcaaatatcattgacttgactcttatttctgactcacctcaccacagcagtatcgcggactattcgtcgtcagccagcgtcgaggacaaccagagaccgtctgccaggttcatatataaatcactataaacaagccatggctaaaacgtgagagggcttgctacagggagcttgaaggaagactgcctgatgaatcagtgaaaggaaatcagtgaaaggaatcatataggtgtgagaagaggatggttgtagaagagaggagcaaatagctatctggctatttatatctgggccagtaagcaaacaatgttagactcattactcattgtggtattgtaatgcagacaacaaggaaatgttgaatagctataagagcctctctactagatgctacgtgataatctagaattacacaggcaaagagtatgaactcaagaaatcagagaactgtctctgtcctttcattactagaactaactagcagcgacttagccggccggattgtcatagtaacacaatccaagctagctttgtcgatcatcattccacgtcgcaacgtattcgtaactgtgattcaaaatcaacacgtaagaccgtaggtcaagatatttggaaaatcccaaagaatttcaggcagaggaaagaagagagtggacgtgaggcgtacggggtcttcaagcccagcacgtccatcggggtattgggggatgaaattttataggagatggggagggtagatcggggcgacacgcttatttgaagacgtgaccatcggcccactccttaacttggccgtcaacagtgacgggaacgtcctgggaccacatgtcctcaacgagcttgcggtcagcctcgttggaggggtcgagcttggtgaactcgtaaccctcgtagtcggggccgacagtgaaagcgggctcccactcctggccgcgggtcatgtaggcaccgtagacgacacagttgtagttctcgccgtaaacggactgagcaccgaagaggtacttgcgggaagcctcgagacgagtctggaagccaccgatcaagttgttggccatgaaggtgagcttgagctcgttgttgtaacggtagttgaccttccagagagagtactcatcggcgttgaagtgctcccagaaccagggcatggcaacggtgcgggggtcctcgttggagaacttgcgcttccagtcatcgaggataagagtgggcttgccaagagcctcaagggggtgcttagccttaggctcagcggtagaggcctcgacgggggcggcagcggcgggggcagcggccttgggcttgggctccttcttgggggcgacgtacttgacgacctcctcagcgaacttggggctggggacgacggccttgaaggcgtcctggttgataatagtgttgtaccaccgggtggtggcggggttggcctcgcgccaggtcttgtccaagacagtggcgaaagcacgggtaaggagggaggcagcgaagatatcggccagagtgatacgctcaccaacaaggtaggtgttggcagtgaggtgagtctcgaaggcggagatggccttcagggcaaccttggaggcctcatcgacagtcttcttgttgtaaccatccagacccaacaaaggacggtaccaggcaccgaacttggggagaacctcggagttgacgaaggacaaccagcggaggatggaagcgtaatcctgcttggtcttgccgagaagggtggtcttctcgttctgggaggtaactatgaacaggacgtgttagtcaagttgtttgaaactcgatggatccaacaatggagcaatcggaggtgacaatggcaccatatgtccatttcaaaaagagagtggggtggtcgagtccaaattttcccgcagagcggggtagccaatatttttttcagagttgttttttctcaacagttgttataacaatagttataattcagacagggataactaatggtgtctcatcataaagaagagaggcataaaaatggaccgaggggtgtgtggtgacgcataaaagggaggatattttcacataccatagacggcaatggcaatagcctcagacagagtgaagccattggcaccctcgaaggcggggatcttgccagtggggttgatcttgaggtactcagcgctggtgttgaattcagcggtagagttggcctgggtgttaaccagctccaagtcgaggtcgttgtgcttagcagcgaccaggatggagatggtgcgaccgttgtcctagaaaatattagacattgcatcaaaataacaaagacgaagataaacatacaggcagaccgtagagctttccgaatgccatattgaatgtaatttgtggaatatgaagggaaaagaaagaaggaagagaaaggagaggggcgagtaagaattttgtgctggcgggacgacttcggtgctcggaggaactgatattgccggggtcacgtcacatgacccgacaaaaaacatgacaactcggagactatcaacggcctccatccaggacctcaaatccgcgttgcagccccgaattccccgccaattccaccagccatggcgtggcacaaacccaccagcctcgcacaggcgatgcaatcactccgcctaacctcaaccctcacaaaaccctcaatccaagcctcccgaacaaccctcaacaccctccgcacacgcacctacgcaacagaaaccgaatccgctccggcggccgcagccccagaaatcaacttccgctccttcacccaacagcccgcccgcatcatcccctcctccccatcctacttctccggcagcccgcggttcatcgaccacgtcctgcagctggaagctctgcaagcgaagtacgccgcactccctacagtgcccaccagcgaggcaccccgcatggcgtggttcaagctggcgcagttccgcgactacgtgggcgagcccgtgcccatgaagaaatacaagtctctcgtcaagatcctgcagcggctgaaccgcatcgagcccgaggtgctgcctaccgaggtgcgcgataccctggctgcgttcttgcgtcccggtaacccgtatgcggtagagactgtcccgcgcacggtggatgagaacgggcgcgctcgcggcaagggaaagaggaaggagtctacggctgttgtgcagcttgttgagggtgagggtgaggtgctggttaacgggaagagcttggtggaggcgttcaagcgggttcatgatcgtgagagtgcactttgggcgctggggtgtacgcagcgcttagataagtacaatgcttggattcgggtgaagggtggtggtgttactggtcaggctgaggcgattacgttggctcttggtagagctttgctgttgcacgagcctgggttgaaggcggttctgaggaagggtatgtttttccttccatttttgctcatttctttgttgacgcagttgctaacttcaattcctttacagccggtgcaatcacagtcgacgcccgtcgcgtcgagaggaagaagcccggtcacgtcaaggcccgcaagatgcctacctgggtcaagcgttaaagtggccagcgaatcctatttcctttttgtttcaatactgtattattcaccacggcaccccgagttcgcgacttgttttatatcctgtactctcaatgcatatggggcaacaattctaaggtttcattgaatttgaattgatcagcgtgttgtatattcacttacacctagagtccacggtcctactatctttaaataggtgttaataagtatgtatggactgtgtggtaaagtccatcttatacaccttatctttcttgccgcttcttcgcacgctggcaaaggccacgaaagagatattaaaatagatgccggtaaggccagacgccatcttcagttatggacattataaccgaccattccgcactaactaactagagcatgcatcgagcctaacaagcactaccgattttacctaatgtggcttaaacatcgaaaccctgcactgggaaatcgttcgtaattgatatcaagtactccgtaggtcgactctgtctgagatctaatccttacaagggtatactaactagcgaacgaatacaaataaaaagctcaaagccaagacgagcctttgacaccacataccgaagcaataagcagcatgaactactagaaaatgaaattaaatgaccccaagccccaaatccaagcccaagcccaattccaaaacgggaacacaaaggtcccgttctattttttgcgccagatgcccttgttcctttttgtgacgccccaatgcaaagcctgtccgatacatagaacagagataggataggaaattataaccgaagccaatgaaccatccacagaaagaagatcatgagactatgtacaactcgtcaaattcgtcattatggtatataagcggggaagtggaagactgtgatgattgtgatagtggccgtggttggagaatgatgaggtgatagtggccgtggtgatggcgaatgatgaaaaagtgacagtgatatttcgcgccacctcgtcagcccgagttgaatagacgataggtataatttgaaaagatcaagcgctgacagccaagccggcgaatgatcgcccctcccggaagaccgatgaccaaagacggaaggagggggccggtcgatctctcatcaaaacgaatgcgagagtgatttggtgcccaacacgaggggagaggtgatagattacctcttcgttgtcaagtatcaacatcggggttggcgcgacgctagtaggcaatagcctccccgtggcggcagcgcttgggtgatgggtcaatgcgtccgatcgtcacggtgcagccgtgtctttcccttctgggagacccgatttgatgtgacgtgagttatttggtttttggcgattttctttttttcgcttttctgctcgcctttttccgagggacttggttcatggtcgaggcactgtcgtggcttcgggtctgacagggatgtggtggaggtcgggtctactgtccatgagatcaaggcattggcccaagactagttttgggatgattaggatgtaatagaggtgcatcggagtatagcgcaaactcaccggacaggatctcttcttcccatatgcccatttgataatctactaatccgtgaggctcaagttgatcgcagagctgaattaggtcccttcccatagcctccagtcggtctcgtcgaattagactcgtatgcgcaggttgttgaccagtcgcaatcacctccagcatcagatccttttgcttttgacatatggctagccaacagagattgaattcgctccagagcttcaaacgctcggagtaatgggtgttgtcgtcatggaggaggcctacgtatcaaacaaaaaggattagcctctcactgtagatcatcaaggtatcgaatgatgcttgcatgacacgcctgtaagcttagagccaaacattagggggcaaagagaacaagaaaaagaagggtccagttgagagtgcggcttctgtgctactaggcgagggcacgcatagtaaccctgtgaacttgttcctctgtcttctccgaaggggcgaaaaaaaaaaacgataacgctagcgagaagactgcatcttaccaagttcccgtgcattggtcaccagccactcggatatttcaagcagcgaccctccagcctctaccaatcttccggctcgcgtttgatcgaaagtgtggcacaggatgcgttgatatcgtccgatggcctcatccaggctaggctgatccgacggttgggactcttgttggggctgatccactctgttcatggacccggaaccgattgcagcgaaatcagagacgggtgcagaaaaggtctgggtggtgttcgggcgtgccatggggtccgcttggttataaggctggagttgcgcatttagataaggagagagtcccgcgaccccagaccctgcagattcttctggtgcaaaatactgtggaacggcaaattggttcgacaggacatcaatggctgcagactgccgtgtctggtactgtggcacaacctcgaagtgtccctgggttggaccttgctgaccgaacccgtacagcatgttagagtcgtagggtgggaatgcagcggggtcctgcggcggcgccccccccccgccgcgccccgtggctcnnnnnnnnnnnnnnnnnnnnnnnnnnnnnnnnnnnnnnnnnnnnnnnnnnnnnnnnnnnnnnnnnnnnnnnnnnnnncatgttagagtggtagggtgggaatgcggcggggtcctgcggcggcgcgcgccgtcgctggtgttgaatagccggcgcttgttgagatcgttgagctcgtacatagtcctggggctgatagttctgcaagtcggttgactgcagggaaccgccgtggaaggagctgcctgtgtatccgtagtcgtaggacatcgggacttgctccgggggttgcgacatccccgtttggtttccacgtggtatggctgggtcaaacccatctgctgcacgaccaggtggtctgcgagcatttccagaccgagacattgatctttcattctgcttcatacgtcgatcgccatccatgaggctgtcccaggatcggtgcagatcaagctcagcccaatgcttgggggacagcggtgggcttgcgtagtatgccagcttggatgatttctgagggggattccagggaactttttccactgaaggcttttcccctagttgggggtgggggagagagagataggagggaaaagaaggatgagacgtaatccttgcggttcaagtagatattcaaatcttgtcctctgacgcagccgcgacacagatttaagtaacagagaaaacaaaatcacacaataattgaaatggaaaataaagtcggccaaaaaagtagaaggagaacaagggggaaaaagcagaattaaaatgcaattaggcaggaaattagggcagagtcaggtagacggagatattaagaaagaagagtgatggatctgaaaagaacaagatggtgagctgatcaaggacttgagtagtaagatagatagatcgagtatatgtatagtccagtccttgaatgggtctaatatagtataagaagggtataagggtaggtataagagtggatagtataagtaaaaaaagggaaaccaagggggaaacagaagaaactagggcttttcccgggaatagaggcaaaatataccccaaatagcaagtagcaaatatcccaatctcaaaatctaaaacattaagccctaaagccatataatatgatcgacgatcgaggatctacatctaaactccatttggctcgggaacccggcgcaatggttcttggcctcgagggatttggggatttgcggttttcgacatttattgcatttcttagcttgttttctttttgatttttgatttttatttgtctacaagttcagctctcgatgtcaggtgggatactttcctttcttttttcctctctgttcttcaatttatagtgtgtaacaccgtctatgttgcctggggctgatcatgaaggagagtaaacatgagacaaaatatcctccccttgcgtagaatgtagaaagggtaagagatgagaaaaagcaaaagtcccaaaagtataactaaacgcagctaaacgcaactaaacaaaatagttggaaaaaaggggatgctatttacattccggggagattagccgggcagctgctggaacctcgcggagatgcatgatatttgaggctgacatgatagcataataattaataatagtagagcagagaagatccgtcatctgattgttcatatcttatacatacataaaactaccccgtgcttaatagaccaatatcaatcaattcaaatacttgtggagcattgttcgcccgattggatctgcaaagccctgacggccacctacatacgtcagtttccttttcctcgggtttctgattgctcaggtctcacgggaaaagcaattattaggactatgaagtactggacaaaggtatttgtttatgtttactccgtactccgtactatttaccctaaagggtccctgtcatcttccaccctagactgaatccgacactttggttgcgatggctattactgcggatgcgacatcgaagatccgctggtttttgtgaagtaattgtttatacttctcccccggagatgatctgcctacactaaccttagctattaatatttaacctataaagtacatttctatgtacttggagtactccgaactttatatactacacagtatatacttaatactgccgtatcgacagatcggatcctctaactgaacgaaacaggataggatcatgcaatatgcggaagtatacatgaataaaataattaattaattaattctcttcaagaaaaaaagaaaggagaaactattgaaaattaaattcaaccgttggacagatagatactcgcgtatattcggacttcaaatcacagttcctcttgatatatctcccgcaaccaggtgcccgacacgttgtataaaccatttggtagcacaaaacacgaggccggaactgggtattatgggcttggatatttgcaatgggacctaaaaaagggagcaataatacattgttattgttgaaacaatggccttttggctactccatgtatactgttatcgaactatatctccatacctggagccatgaccctgtttcaggtctagatatcgtcaaacatgtcagacgaaacatgcactaatatctaatcttagaatcccaaaaagaaaagcatggaccgaactcttcttcacactcttaatcccatgaccaacagactcagacagaactctggaagggtcccacctgaaacacgacaaacagactattactacctacatcggatgttttatgtagacagtaagtagaccgaaagtaactggacacccccttcttcctttccttcccttcctctcctctcctcgtaaataaggaaattctattaaaaattaggaccattccctcgaaacaacagtgcctcgccttgtgcgacttccatctcggactgcagacccaacgaatccagtgcctcggaattccgaaattaccgtctcaccacgcttatccagtccggttgcccagtcaggaccacacacgtcgccgagacgggagggtgagcgtgtagataagtgtggaattacaattagcatcaaaggttatactacatagaaaggtcgatttcgcaaattaagcattttcccgacttttcgtctacctaaaaacctaaggagaagatatctaaaaaaacatatgagactaccatcgagtcaactagacatgtcattctcatcttagtgacgaaggctggtattatggatatgtgcagagaacaaatgtatacacagcgaaagcatatacaatctgcgtaatgaccctacttacctagacggcaatgtacccacgcctacccaacgatatctctcttttaaccttttaccttccattcctccctatccataccggcgtggacacatgcacagactatatatgtatgcagacagggatgggacgggagccagggtccgggagaacggcaagaacaacatagaacagcagaatgggagcgggggtagtttgtgctgccaaggttaaagcaataataagatgcaatatgcaccacctctacccgcaatgtgctgtgcaaaccgacaaggatctgtgactgtggctgctcccgtacccgactcgttggttgggagtcatccggtccacgagactgcggtccagagggaaagggatgttcgagggaggggaactggtgtttgccgaggttagttcgttgcgcggaaactcatggttggtccggatgggaacgggggttgttgctcatgcggctgaaacgtcaaagctttgttttgggtctttgttgttagagttgaggttgagtgaagcgtgtgctggccagacaagccgatgctgatgtgaggtagggaccggggtgtgtgggtgatttgtcggaggtaaagttgttgggttgtggaaggggtcatactgtacttctaacatacttgagtctgtcatgcatataccttccagggtgacattatgccctgccatgacactgggtacctgagctgataggaaaattgacacccggaacaaagaaagccgggagaagaagtcatggggaagataatttccatatgtccttcccatattgggagaaataaactacacgcatcgctgatcattgagtcatgtcatgtcgagaccaagaaagagaaaaccgagcaccaagaagaaacaccatatcgccactcaaccagcgagtaaggcaatcatatttgatctggaccatagttagcacgaagacctccaataagaaaacccggatcaaaacatactcagtgtcatactgatgctcacgtctgtgttctccaccatatccgtgaactcctcgaagctaatctttccatcctgatccttatcggcctccataatcgtcttgtcgacgatctgctgcagctgcacgtccttgaggttattgccgaccatcatcttcagcacaatgaagagctcgccgttggaaatgtaaccgtcacggtcaatgtcgtacaccttgaatgcgaatcgcagtttctcttgcttgttaccctttgagctgaatgccgacaggcccgtcacgaattcctggaagtcgacgtcaccgccaccgtcttcgtcgaagatggcgatcatcctagcataaaacagttgggtcagggactagtccgtgtatatatgtagatcgcagatcgtaggtgggagtttggagtttggatgtggatgcccagggagcaacgaacctcgtggcgagtgggttggacgacacttggggaagggagaggaattcatcacggtcgatagtgccgttggcattctgtagattgttgagtatgttagagcatattctcataatccgcgcgacgcaactgaccttatccagcttcatgaagcgcttgcgcaggcgatccacctcatcccggttgactgtggtcgcgaagtcagccacaagcccgattcatcgccttcataccctatccgaccggggaaaacatacagttggatgtagacacaatgttatcgaagagctgggtggtacccacggagccgcggcgtctccgcgcatcgtaaatcgcagcagcgttgggctcgttggtggagggctccatgttgggtagttggggagggaaaggagatgtaagagagcgaggtacggtggcgagttatgcgataaatgtagcaaataaagttgtaggactagtggaacagcaagtaaagaagggccagattaagcaagacagcaaaagaggaggcgaagggttgtttattgccaacggcccggggaatctgatatcgcccagccccgcactaaccggaagcggacaggcaagcgagcccctgaggccgtgcactcggccaaaacaggccactgccggctgacattacaacgtcaacccaaccgctagccgtgaatcacctcatcttcagtcgtcaatatctccccccctccatcaaattccatctcaaaaatacgtctacgagaaagcgcatacacagagctttgtactgattcccattttaccccgtccccgcccatggtcgttgccctattgcgcgttccgacgctatgactcggtacgggggcctgggcaggacacgccctaaaaagctcacctctaaggcatctattcccgttgtccgggagtcagagatcgatatcatcgacgatgaaatccagagctctctacagcagatcgaaaccggcgtcgaaaaggccgaggagtcggtgagtccctaattttagcctcatccccatccccatcacgtgacatcatcacgagattttcaccccaatataaaatgagtcgcgctgaccttggatcgggttaggaaattcacctgcaacgtgcaattaatgccactgcccagggcaaagtaaacgaggcacacatccctactcccgagaccattctcagtaatcttcaatatgacgaactctatcctcccatcttctcgcagcctgcgacgtacattcgcttctcctcgactgtcgaggattgctgcggatgcccgtacaacatgacagaggacgatgatgcctaccttaagctcatgaaccagaagcgtgatccatctgctggtcgttgcacagaggatatctttgaggaggtcatgaatttcttcgaggagacggcgcagataaagcagccttacgcagccattgataatcccccggtgttatcctttgcagagatgcaggacatgatggatgccaccttagaagatcccatgaagatatttgccaaggagatatatgagcactggaagtcgtgtcggatgtctgttcagaataacgcaattgtaccgcagctcaaggtacgttcttttcccatgccaatgacaagcaacgtcactaacttctccgcagttcgaaactggtcaagacaccgacgacagtgatccatttgtctgtttccgtagacgcgaggttcgccagatccgcaaaactcgtggtagagatgcgcagagtgccgaaaagctcagacgtcttcgcaaagagctggaagatgctcgcgagctcgttgctttggtgcgccagcgtgaaattgctcggagggaaatgctctccatggagcggcacctcttcaagcagcgtgctgaggtcaaggagatgaagcgcaagctcaacgtcaaggacgatgatgaggacctcatcaaccaaaaggtaggcggcgttgatactgtggttgctcaatatatgcatatgctaagcaatcacccacagccgaaaaagagagcgctcgatatgccagctcaacgtcccaatgcccctcaattgcgcatgcctctcaaggctgggcaaggtgcagaggatttgcaactcctggaagacgtgcaggccgaaaaagagaacgagattctgcgcgatatcaagcagaacatcaccaagcacatcaagtggaacgagggatacgtggatcacacccgtgcaccactgtctccttctccagaaaggacattcgatgtggctaccttccgacccgcattcacggcacagttgcccactcctccatcgtcagaatcatctggcgagatggagacctccttagacgtcactagcccgctattctctaaagacaagcttgcatcgcatgacatggagatgcacgacgtaccacaccgaatgccatctttccgacgacgagttggacgtggtggtcggttgatgatcgatcgtcgcaacatgggagcaaataaagttgagatggacccactcaaggccgaccgattcaagtttgaccaagaagattccgacgaggaccacgattatgacacagatgcgtacagcatccaaatcatgcagcatcgggctattaccatggccaaggcgcgcgaacaggctgcagtggctgcccaggctcatgcgcaggcgcaagcacaggcagcccaagcccaagcacagcgccgactgctggagcaaaatggtcaccaaggctctatggggtcgaacctcggaccaggtgccgtgacggtgtccgaaacctgaatgactcttctcctcttttctcttccacagcatttggcgggcgttttcttcgtggctctggcttccctcgtggctcggttcccttcgtctctttatccttttttcccctttaacacacttgtagttttattaccctatcatgtttcatgaattccgcgggcgggctggtttgtttcttctttttttgcgtttccgctcacctcctcctcacacatctctttcttgacatttcgtttcaacgcaggtgctagccactcatggctaagtgcgtctgcatttgttagtgtacatagtatttttttttctcccgaatctcggtggtgttggctggtgtcgggcagcctttgtatgatggataaccgaagttatgatgcaagcgacgaatgggagggcaaaggaaaaggctcaaaaacattcagaaaatctaaaacaatttaatcactcgcaaaaagcacttttttttggttctgttggggttcagtagaacagactgatatcggccagagtaaatgcaagcaagagcaaaaaaggggctcacatcctcttagtcttggactgtcgcgattcatcatcatcacagttggcagaacgtttcaatgaaccagaagtagcgggctgcagcatgcccaagacagcctgcaagacctctttctcgccaatgcggacctgcaatgccatccgtacgcggcgagcggcctcatccacgtgaccagattcaggcaacggagaaagcgaagccctaaattggaggtccgaggccaacgacgtagcatattgtgcctgtcgcttttgcagcgccttgattaagatggcggtcgcattggcgtccaaaactggcctgggagccttgtccttagccacgcgctgtttgaattcctcaggggagagagccagcgtagccagaaggaccaccaactcggctggcagtatatcttgcaaagacgggttggcgttgacgggtctggggatcacatagccgtcctcgaggatgtcgtgacttgagaggaactctagtcggggttgggactcggtatctgcgttcgcaagccctgcggcttcgcagatagtttccaatgatatttcaagtacgtcgtaaacagcgtagttatcggtcacataaccgtaccggcggaggagatctgcacgggggatctctccgtaatcattgaagatttcctcgccttgttgaattggcttgattgccttcatgactaaggcgccttcttcttggtacagacgggcctaacaaaaggggttaaaattagggttgaaaaaaaaatttatcgtgtccaaactcacgttgtttcggtcagcatcggcgttaaggagatccgcgagcggcaccaaccccttaggcagctgctcttcctcttcgtcatcagtcatgtagctctcctcattggcctctccttcattgtcatcgtcttcggccttttcaatgtcaaatgcataggccataatgattgaccccatgacatggcccacttgaatgagggcagcgtcaccagcatcaccttcccaagacttgagaccaaaaggaggtgggaagagatccggcctctttgccaaaactggagcgatggaatcccgaattgactcctcggcgtctgaccgaccaattttctccaaaatagtactagcctgcagctcctgcagctcggcgggcgaccaaaacatcagggtgtcaaaacgagagggcaaaactctgaaatatggagcccatcttgacttttctccttgcagatattcatacaccatgaccagcatcagagaaagccacggacccatctgctcctctaaattctcgccgagcaggttcctcagctccgagttctgcacggtgaggaccatggcgcgcgggatagagaatagttcttcaccttccgggatgttgctttgtgccactagagcccgggcgagatattagagactgactatgagaattatgaaaccttcatttttggggagactccgtatgcacttttgtgtggtttaggagtatattctttcaagacttaccgacaccacgtccagctccagttgctcggagatctgcgagcctcagattgggattgagccgtacacctgggctggcttgcagccatgacatgaagttgtcagactgttgttgaaagccctcagcgtcagggaagtgggctgtagaagacatggcgggagagatcccctgggagggaaaggaggagtagggagagggtgtgaaacgaagaagcaaatgaagtggatacaataggggaaaggaaaataatggagaagaggggaaagaagaagaccgtcgggagtatgcaaagtagagagaagggtagctcgggtttagttcgggacaaccgacgggtgccgctttaaaggtcgataacgataacgaaaatcagacgccgccgcccgaggtctcatacatcgcgtatgaaggtattggctttcacttggtacagtctcgttgatatcttgaaataccgcccatcatgatcgcaattggtatggaaggctcggccaacaaactgggcatcggcatcatgctgcatcccaaggatggcagcgccccgcaggtcctcgccaatatcagacacacctatgtctccccaccaggcgagggcttcctgcccaaggatacagcgcgccatcaccgatcatgggttgtgaagctggtcaagcaagctctcaaagaggctaaggtgtccgtcgacgatgtggactgcatttgcttcaccaaaggacccggaatgggtgccccgctacagagtgtggtaatcgccgcgcggatgttgagtttgctgtggggtaaagagctggtcggggtgaaccactgtgttggacgtaagtacttatgcaagctatgtcataaaccgtgcctcctatttggagttggaactcgaacaaaccgctgactatgtgaatctccagacatcgaaatgggccgcctcatcactggcgcaacaaacccagtcgtcctatacgtctccggcggtaacacgcaggtcatcgcatacagctcgcaacgatatcgcatcttcggcgagaccctcgatatggcagtagggaactgtctagatcggttcgcgcgcacgctgcatatctccaacgacccagcaccaggatataacattgaacagctagcgaagcaaggaaagcagctagtcgatcttccatacgtcgtgaagggcatggactgttcattctccgggatcctggctgcgatcgatggtctcgctaagcagtgggggctaggcggggaggagaaggcgcgagaagatgaacagaagacggttgattctatcaccgcggacgagtcattagaaggcaagcccacacgcgcagatttgtgcttctctctccaggaaactgtcttctcaatgctcgttgagatcaccgagcgcgcaatggcgcatgttggatcgaagcaggttcttattgttggtggtgttggctccaatgagcgtttgcaggagatgatgggtatcatggcacgggatcgcggtggaagtgtttacgcaacggatgagcggttctgtatcgacaacgggattatgattgcacaggctggtatgctggcatacgggaccggattccggacacccttgagcgagagtacttgtacccagcggttccgtacggatgaagtgtttgtgaagtggcgggattgatatcgatgtcttgtttgaaccaaaaataaatctattatgtgttatgaattgagcgactaatctgatatcctttgaactcggtcggttaaatttgggaaaatcatatccatcactcatctcaagcggttttcaaaccatttgtattattgctgcataaatcgaagcgcctgtacagctgtaaaatcccaaatcccctcccagcacgaaagtaacgcctgaaaaaatgtgtaatatgtggtgatctcctcactagacagatcgttcaacggacattcatgtgtattggttgtggtcaatgactgggcgatctagtaataggatctagttgccattaaggaacccgagaacacctggacagacaggaaggactggcgagaaatgagccgaacaaggcagggaattgcttggaaatctttttatctctgcaaatcggacagaccacaacatgtccgaggcagtattcggtaaaataatgtatgcatgcaattaaaagaaccgcctatatgtttggacacagctcattctgtgacatcgccagtcggtttgtacaaaatagtcgtgacatactgcagacagattagttaatccacaaaggtgtatagagcagtgacttacttttcttttatacctggttgtcgcgcttgtagccaggacaccgttcttgatactgctcgtggcaaggtgattgaggacagtgtggttcggatagttcaaaacactgctatcgtctttcatgggagtcgtgccgttgagaattgacttacccaagaagagaggcagactgggaggggtagccgtatctccgatgacattggcggcctggaaataggccgggctatcttcttccttgtccaggtcggccaagaattgaggaatggcatcaccgaaatcaccgggtggcacctcttcctcggtttcttccttttctagagggtggtcttcggtatgtcctacaacctgcttagaggcatctggcaccgtgtttggagtttgagctcccgctggaacggccgagtccttgtcatgagcatcatctgcactgacttcaatgtagttgaccagatgattagtaaagtcgacggcagtcggaagactatccgcagcgcgcattgttccatcgacaatgaatttcaagtggtgcgtgccaggtcgaaggttcagagtagtagacatgacggacggatttttttcactatcgagtgttagtcaagtcccggaaatcctagcctcatcatttgaccaaccttctgtgcagacggaacttcttctcccagttaacaaaagttccagtgacgtagaccttctgaccaggcgctgtccattcaataaggaccgggacggccttgcccgcaccactgatggtgtatggctggagctcatcaagcaactcctcctcttcaatggttgtatgacctgaagccagagtgctcggatccatccgttcgtctaagaggcgatccgctggcatcgactggatatgcgagtcctcggggccggcgacaggcgatccgggcgtggtgttggcatcgccaattggcaatggcaggcgtggtggatgttgtaggtgggccgatgcgctatagtacgaattgaggagcggggccgatggtgccacaggatcgcgccccgggacattgcgcgagatcgggacttggaccgggttcgagtggtcgcgggatgggatgtccttgaccgcggagggctcagctcgacgtacgtcttgtggcgaagccttctctatgtttttgggcgaagattcagggacgtttcgggattgtagacgttcttgcacggatccttgaaatcctgccgagtgcccagcagctgtctcctttgtggccgaaggatcggccacggtggtcttcggggccgagatcgtgttgagagaggatcgacgggcgacttttcgatcgcttgtagagctgtggtgggcatgggcagacggcgcgtcgcccaccgggcctttggaagggttgttgcccatcgaaggcggggaaaggtgcgatagccttgggccgagattttgctgggaggtggggaaaggggagggtcaaactaagtcacaatggcgggctaagaaagaaacttccgacgccagctcaaagtaaggattggcggtgggcagtagtcaaagtcgattgatgtactcgcattgtcacggtacagtagacgccgatgacgccggaatcctaatccggcaggttagggcttagggctttgaagttggaccgcggcgcgtgttacttggatatcataacagtcgagacgcatagttagatgatttgccacatattttcataataatcatgagttgggtatcgatcctgaaatatcctctgttgctcgttgttggctttataatccaattactatcctacttgttgtcaactctcctcttcctcgcatcgccagtgatctacatcggacatgtcttcttatacctggcactgcttccattgcgtatcctcgtgatattagaggtatgcatatctaaatatcgtagtctttagtggtagcatgtactaaactctaatagggattcatctatttcatgactgtggctgtgcttgtcggagccactataggcatgatcctacattttaccggcagcgtcatatcacaattcctgcggattgaagagtcaaatgagccacggcgacctcgggtgaagcaagagcttctatattctgtgccccaaaatcattctttcgactatctagcagcgcagctggatgatcgcaagttcctgccctactcgacgatcttggaggaggaggagaacagctatgagtcaggctgatgtgcagatatctcaagtctagtgcataatatttctatgcctccggtctggcgctttccaaatggactctctattcttaaatacataagcctggatttcaggtaccgctcgctcaagccgaaagcatattcttgatggttgtttcaaactgctcaggttcgcggccaagcagtcgcgctagatttggagtaacaaccgcacattcaccatcgcggattccatcaaaagcagtcgcccagagaggcgcccagttgccaccaccatatgtgagaccattttggacctgtggctgcttgacgtactcgtccacggatacctgtcggatcttgattggcttatttagcacacgactgaatacatccgctgtttccttgagtgaccaagcacgagggccagagagaaggatggtcttgtttaaataagggaaagcagcgggatcttgagcgtgttgtgcaatgagttttgcggttgcttcccccaactcgtcttgtttagcccaagccaggccaggagccgagccatcgtgggggatacagatctcgttagaaggagctttgagatcgaaaaaggcagtatagagtgggaaggactctgaatacaacccttcgcgaacgacagtatacgtgaactgtgggtcttgagcgtgtagctcggccagatacttctcagtcgcaatgtgggcaagcatcacttgggccttagtattgagatttccatcaccggcaaacgcaagagacgagtaaaagatgtgcttaacgccactctttcgagccgcatcaatcgcggacttatgtacctatgaaaccagattagactttatgcgtcgaaaggttgtgggaaatgtaggaataccttaaatcgatgctcgttctggatactagcataggagatcaagtttaatgacgaaattccgtcaaacgcatggtcgagtgtctcggcgttgtcgtaatcggccttacggatgatagctccagcggctttttctttgctgagtttccctgggcggcgagcgactagcaccacttctttagcagggactagctcaagaaggtgcttaagggtactgcctccaagacctccagaggctggaaatatgccaagcttatttgccatcgctgaatcactgatgaggttaagaggaagtctactgaagtttactgtactgcttttatatccagcggatttgcagtgagactctgaaagtctccgactcggatgaattaatgtcgacttttcagctctgacatccagtggaagtccacggatggactcagtagttgattagtcaacatatacttccaggactacttaagtatcatggatatcgggaaccttggaactctttgtatgatatcatcaagttctcatctctgtcactgtgcagactaatcaaatctgggaattcttcaggcgtgattaggcgtgagatccgatttcggtagactcggacatgaagttggtcaaagcggggggtcttctcggagacattagaactaactagctcgaagaaggcgctggattacaaattcatagattacacgctttaggaagaatcccaaagagccactgcgaaggacagtggagtttgcgtatcgtcagggccaggatattggcatccagcagacacatggatgcaaatcaagcactaaaatctgtttcattctttcgagtccgaccaagaatatctctcgagcctagtgtataatactgtacaacatgataaggtacaatcgagcttactatccctggcgggtcggaccgctcatcaaactactaagagccccaggcaaggaggcgacctatcgaatcttcgcacaacatccttccacttgagatatattatatgcaccgactttgcggtctagtagaccaacgccccctatattgcctaattgggccacatatgcgatccaaccaatcacattatacacgtccagtttccaacaataaaaggtacggtgatgtagcatcctcaaatctatgtttaaataggtactctcttgataacaccaatctcagcctagaattgtccgatgaacgcagataatataaagagtagatagagagcagttcccacaatttcccgagctaagtacctacccgatccagtcatattgccgcattgctgaacttgaattgtttaaatactcttaaataccatcatgtttggacataaagatacaagaacagacttatgcggtcttgtcatgtcttgtcttgtcagtagtctttctagttctctttcagtatgtctttttctcatgtcagtgttataaccccaaaatattgtgaaaatggtttggatgtaacttaccgaggtacttgtatgctataaccaatcagtaaagccctacggaatacatgcaataacagctgcgaaaacccgcaacctcatgtgatgtatataattgaccatgtatgaagtacatatgcagagaatgtgacagcctaagcccatgcatactcctgctagaggtcgccctacttttaaaatagattgggtctcattgcattgccaaaagcacctgaggacttcttggcttgttttgtgagattcccataaactgatcttctccaccttctacaacatactccgcacgggaacatctatatttccctctgctctttttcaaatttcaatcatgccgtccgactcgaaaacatcttccaagtatatccacacaagactatggtgtattcaccgcgctgattcttgctaactcttaggcaggtcaatctttgcaaacccgccagtcaagatcattgtgggcagtgacgagcgcatttactatgtccaccgtggaacactcgagatccaccccgcatttgatgcccgactaaaggcttccactgacgaatacgaggaggcgattgattggagtggctttgacgagcagactgttgattgtgtattgaacttcctttacactggaggttatcaggcacctcaaatgacttctgtggcagccgaggaaggtgagacagatgcgggggaagaggccccagcgcaagacggggaagaacaagaagtagtggtggaggaaacagaggaagcggatgaagaagatggtaataaaccccctcttacatcttcccatctcggtatcaaaaatatcgagacactaataccatgcagaaccacaatcaccacctgacagcccacagtcacaaacttcatggccacagtcaccatgtccaatgttaactgcacatccaaggattctgcaaccagtcgcggagtcccccatagccccagactcaccaccatccctggccctatcagagtgcgacctaaatgaccggcctctgactcctctagaatactgcgctggagtcactctgccctcggagcatgtttcggcgcaaaaggtcggagaccacgaaggagaagaccaagaccaggaagaagaaccagaacaagaagctgaagaaaatgttgctgagatttatctccacgctaaagtgtattccttcgcacggcaactcggcttcgtgaaattggaacaattcgctctgaatcgcctggccgaggtccttcttgccctagagcagacagacaagatcctattcccgtacttggtggatgcaatccgactggtctataagacgactagtactattgataatgcgaggaacttgctatctcagttcgtggcactgcggtacaccacgctggttggcgaggatctggacgaacttatcacagaggggggagagtttgtggtcgatctgtcgcataaacttgctcggaaactgacaaccatctcaattgcgtttaagaggattgaatatctcactcataggaatgaggagttgaaggaagaaagttctcagaaagataaagagctgaaggctttgagagaggaggttaggcatggaccgatacagggatttccgtctttcacatatcagatttgaagttgtgctaggcgttagtacacagtcaccgttcaatggactaatttttgggtattttttctttcctcggctcttctcatctctcacgtacatcaatgatttatcataggtatacgtgtaacgtgcttataggcaacccggacccaacccatgagccaatggcataaagcccaaccggatcctactgctcacattttctagcgccgagctagtgttcgccgatattgatttccgtgcgtttcctataccccacaaacccaatagttcctagcagatctttcttcagctgttcatgcaaagatattccggactagattctaatggcgtcgctatcacctcctgtctgctataatccctactatagtccctacttaatccctgcttagtgtgtacaggccgccatcgtggggttggcctccactgttgattttcaccgcatagcatgtccattccgttgggtgacttgtgggccatgtcctaggcgccgagcctgagatcgggcaacaacatgagacccgaacctgttctgcaagatcttgcgcattaatgatcagctgaagctggtgggtacatagtgggggcacgggtgatttcagctcagcaattgatttcattgaaattccctttctaccaccgaatacgatataagtaggaccttcttgcctggtcttagaatcttctatagtcagaaccttctacagtgaatctaattattatttcaaaatgtccacggtatgttatcaacgagtatagccacaaccaggtgaaaatacttcctattcaacggctcgacgctaacattctttgtgctataaagacacacgtttattttgaggatatagaggcatatacggatcacgcgcacacaatctatcagtaagtctatatacagcacagagtaaactcgtacaaccatgctaacaatgtattcaggatcatcgaagaggccggtttcgaaagagattcttatctaaggaccatgagctatcctcccgtcctatatttacccacgtaagtatctccttggcttcaaaggggttctgattatcagaacctgagctgacgtattaattagtgctcgcctcgatgatgatactgttggcaaattgaaggagtatggggtgcgtgttagacagggggatgaggattagatatagtcaggccgtcctttaccattggcctttggcgagcgacaagggctgcgctgcacatgggcagaagccagacgtggctgacggagagaggaaggcgatctagccagatctacagatctacagagcaattatagatggttccacaccggtttcagaagtaaattctctattattggttgaattgagacacgacagatcaggtgatatccgaatagtatcgtaagtcatgtgactacctaaagtagcttaaaacaaatagtgtttcccgtatgacctcgttgattatttggaacgacaggctgaccaattatatatagagctgatataagattgcctctctacatgaatccttcaaggcttatatacggccgaaaaagcggtctgtgcaaaagggataatcttccatttacattctggaaatggcatgtctccattgaatgacttgccatagctcgcgccttgaatacatgaccatcgacgtcattggaacgatcgtcgatcttatcgatcaagctgtggggtagaggacttacatccgagaccttccacgatgatcccgagatcctttctgcgcgtgcgagcgctgttggcagccttcatactcgctgtctttctcacctgggcaatattgacacagttcaaatcctacatccccaatatctcgtcttcacgggccattaccacagacctaacaccattacatcgccaattctggcaagaattccacgccctgctagagaaatatgcgccgggcacagagcctatcgtcgaatatcagagggcgcccacagaaggcttcaatgctcacaatgcaccgccgcgcccagataccctctacgttccggaggaagatatcacaaccatgaaagaagcgcatacggggttcgtcaatgcaatcgccgactccccacccgagctcccctacctccccaacacaaaaggcatagtctcaacagcagggggcccctacctcccagtgctagtgatatccctccgcatgctccgccgaaccggctccacgctcccgatggaggtatttctctccgacgaagacgagtacgaaccctacatatgcgatgtagttctaccctcgctgaacgcgcggtgcgtagttctatcccgcatcctcatcgcggccccagcccaaatccaaaaataccaattcaagcccctcgcaatgctcttctcctccttcgaagaaatcctcttcctagacgcagacgccttccccctcaagaaaccagaacatctctttaccaccgagcccttcctctcaaatggcatggtcacctggcccgacttctgggcctcctccgcctctccacacttctacgaaatcgcaaaccatccgcccccaccaatggacctgcgccagtcaacagaatcaggcgaagtcctcctctccaaacgatcccatctccgctccctcctcctcgcaacatactacaactactacgggccctcgcactactacccccttctctcacaaggcgccgccggcgaaggcgacaaggagaccttcctcgcagccgcgaccgccatgcacgaatccttccaccaagtcagcgagtccatctgcgccctcggccacgaaaccatccacggcggcatagccggctccgcaatggcgcagttcgatcccgtgcaggacttcgccctgacgagtcgcgggatatggcgtgtcagaggtgacgacgcccccgcgccagacgtcttctttatccacgccaactttcctaaattcaatcctgccactgtcttccagctccatgatgttaaccccgcgtttacagatgagggggagtatacgcgcgcctggacgctgccggtggatgttgtgcgggggttcaatggcagggttgatgtcgagaagggattttggcaggagattctttggacggcttgcgagcttgaggataagttccggagttgggccgcggatgagggggtttgtgatgcggtgagggagtattggggtgctgtttttgggaacggttgattttaccttgagatgtcggttcggcaggtatgagaactgacattgctattctcgatttttatgtgtctttcccggaacgcataaccaatgtctctctccggttgttgaccttgcacgaccatggaataatgcactcacatattcccccgccagaggtgtgccagaatagcctctcagaaatgacctctgtcataagaaggtcattcttgccaagagcagcaacagtatcgagaagaaaacactcttctaaaagcattcgaaaataatgctcattcacagacttctacttcttctatatgcatctcatgtatataactaagtagcgagcctcgttgttgtgaacaatctccttcttttgctcacatttcaagcgagggaacgacgacgtagcttcaacatcaagactccccaactcccaacctaagataaagataatcctggataatcctcgcaacctcctctgactccttaagaggggaacgacgaggtactcgtaatttagcttatacggaaaaagtagatcgaggtgtggaagagtgcgctttggagtcgtagcatggtgcggtgccacgggctgtggagagacctatataatggaggccttgtgcaaatgtatcacttactttgtagttttagctagatcgaaagtaatggggatgaatggagcagtcggcgggtctgatttggcgggcgatgagtgcaagatatagagacagaagaaaggaaaatacagagaaacagaggaagagcagcgaagacacttcatatcagtgccgtttacacgatacacaataaacgaacgaaaccgatatggtatgacagagccaatgcgttgactatgcaatagtattcatcgggcatcacaaaccacaaacccagccatctaaaacaggtaagaatacacaagacgggatatctaagaaacaacgcaaatgggaggcagaacgaaaagaggcctatgctcagtatgaatccatgcatcaaccacgagaacagctaatagctaaacacacctcaacgcttcacaatcccgaggccctcctctagacggtcaagcagcgaattcctcgacccaaccgatgaagcaggtgacggggaccggtcatgcttggctcccgatgtagtcatgacttccggcggaacatacgcatcgacgtccaattgcattcccaccgtcagatccgcatctggagggagatactcaggagatagaccgcttgttatgatattggcggcgttggcagcatgggcagtagcagaggcggattcaaagaccgccccagaaccagagccagaagcagaagcagaagcagaaggagaagcattttcggcttcagcttcaggaggagcagcaacatccctattccggaagatgtatctgtgctgtacaggctcacccacaggaggatcagcctccaacttagcccttctggcgaggcctttttgtcttcggcgactcggttttttgccaattgggtaatcgtgcacgtttggctcgatactggcgacgactcggctgctcgttccattgtcaacgttcggtgtgggaataccgtttggctcctggtatttagcttcgacggtggcggcagcggcggcggcggcggcatccttagctcttttgcgcgccttgcggctcattgggatttccccgtttttcccttctgttttctgttgggattgcgttggctgggtagttgtagtggcggttgcggatcccgtagctgcagtgttcggggctattataattgcggcattcgccttggctctagccttggccttcttatttctctttgacttggcagttgtaggagcagggacatctctcgaaccatcaaacgttatgggatcgcttttagagccggcattcagctgctttggagcgttcaactgcgttgggaggagactaatcccgccgtcctcatcgtcgacagaatcctcgtggaggccgatgtccaaatcaaggatagttccctcgcccttttccacgcgttcgttccaggcgtggaggaccttgctcacgtcgtcgtggtgggcgagataatcgagacggcgaaggaccttattgaagagctcggtctcatcgatattaggatcattgctgaactccgggatctcaaggatattgtacggctcactagaagccttagttctgctgtcatcgataagaatagtgttggtctggtcccagcggtggcccgcggtgagctttgcagcctcggcatcgcgaagcctttgcttgcggttcttgtgcggtgtattggtgcctggtgatgaggcaggggggttttttagatgctcgttgcctgggaatgcgccttggatatttgtctccgcccagactttgtgcagctccttgtagacctggagctttttgttgtattgaactgaggtcagaccgaacttgtcgcgtccccagcgggcgacgatagcatcatgcatgggccctgggaagatctgctcgcagactgcctctacagtctgcggttgggagctggaccagatcatgactttgtagtctttgattagcgtggctaggaattcatctaggcccgtgcgtctggcgaatttcggggggaatttgcgaagcttgcggtagatgagggtgccattgagatcgaggataacaaggagtggtcgcttttcggtcttctctggcttcaatgacgcttggtttgtgtattgcagtgtgggaagcgggattttgactggtggtgttggcgagcgttgtctttggggtgatgcgaaccgttgtcccgtgccaccggccatcgtactcatagatcgggtattttggaagggtagtggggtattcatatcggcagggaaaggaaaaggtgggaatggcatcccgctatcaaagcctggattcatccagggcatagcctgtgccatttgaaagaaagtttgatccatgctcatggggttttgcggcaaagtattaaaagcgccgaattgttggccttgtcccaatggtatttgtggttcgtattgtggcatggtaggagcatagccctgagattgataggccggtgacgtttgattagcctgtggatgctgatatccaaagttcgagttcatgctctgcgtaggagtatactgcgaaggtataggattgccttgcacaagatagtcatatcccgcattacgatgtacatcccgaggggcattgcggtcccaagagttgtgtgagggggcctgccgacttcccccccgtccattctttgctgatccagggttcatgttcacctcataatctgaatcggcatgctggggaactgaattcgactggtgttcggacgtaggacgtcttttgtttgagcgggacagcttgagggaggtgcgacgtgacgaaaggagagtagagaatctccgggatttcaaagcgctagaatttggcactgcaagaagctatttaaaagtaagtcagaataatcaacaatcgacatatgctatccacgtagcgaatagtggaggcgatacctgattggctgctctgagaagatgctgagagtgacgcgaagagaaagtaagtggggagtgaggggaggctcggccacgcagaagatgcaggaacatttataaaacaaacgcaaattgcccaggtggttaagaacgttcttcccatcagggcatcgcgaaaaatatctaatcagttcttatcgctctgaccgccccaagcggcaatatttttctttttgacggttcttcctccgcggggttttccaactacagcaacaccaaaatggctattaccgatctgctcaatcgccgagtgcgagctcgaccagaagacgaggatgtcttctctgaagcatcaggttccgacgaggattcgcaagctggctctgatgccgaatccaactccaacgaatcagtaagccaaccatacatctacttaaaaccaaattaacaaacaaagcagcacgcagacgactcctccgccgaaggcacagacacaggatctaattccgactccgactctgaaccagacatagaagaaaaaccagaatccgaagccgacaacgacgacgacttcaaagcctcactagcagacatctccttcggcgcgctcgccaaagcccaagccctaatgcgcgagaagaacaagcgcacaccaaaagacggcaccaccgccgcctcctcaaccgtcgacgaaatccgcacgaaactccgcgaagcacgcgaagaaaagctcgcggcagcctcgaagtccaaatctaaagaaaagaaaagccgctcctcgaagcacgcgccgatggagcaatcgtccaaatacgccgtgacgcgcaagcgcacagcagtagaactcccgcccgcgccgcggtcgcgcgacccgcgcttcgacgcagccgtcatgggccacagcggcgtggggaagcacccgcacggcggaacggcgtatgcattcctggacgagtaccgggcgtctgagctgaacgagttgaaggagcagatgcggaagacgaagaacctgcagcagaaggagaagctgaagggggagattcggcgggcgcaggataagctgcggtcggcgcagaataagaagcgcgaggcggatgtgcaggctgagcataagaagcgcgagaagcagttgattcgggagggtaagaaggctagtccgtactatcttaagaactcggagttgcagaagcaggttcttgagaggaagtatgcggagatgggatcgcgggagcgggcgaaggcgctggagaggaggcgtaagaagatgacttctaaggagcggaaggagatgccttgggagaggaggggggcggagggtggtgaggatggaggcatgcctaatggagggaagaggcggaggttggagtaactttttgtggtatacggcgttgatctatctgggaataaaagcacatatagcatatgagtattgaatatctgtttacatgtccacgggtatatgttctcgagtgatgcattaaaatgaccagtctcggagctgagggccctgatggcaatagcaaaggctgaaaagaagaaaagaaggcattccaaataggccaataagaggcagagaactcattaccataatgctttatctcccaaaaacaagtccaaaaggtataatacgaagcaatgaacccgcaacgcccaaagcaaacttgatgcagaaaagaatccaaacacaaaatttttacagggtgccaatctgccctgtcaatactgtcgtggcatagataacatgaaattgatgcaagcatcattgggtatgatggaaggtttccagactcgatcgtccaggatgagtcggaagatggacattcactgcccaggcattgcattggttggacttgccatggaccaatgtcgcctgggacttagtatcaaaggcctttgcattccaaggcagcaaactcctatgagaatataagatgatagcatcgggatgatctgagggttaggcatttgccagcaagtaggtccaagcaaattccatcattacttgaacttgggaagcagagccggcctaagcctctacaagaggcatgagaccaacagagcatgtcgtatcacgagtggaacaaatcccaagcccgtgcacagagacccaggaattcatccttctttctccgctgcgtctctggcgaatctcttcctgcaccgaaaggtccagggaacgaagcatgtggaccgggcatggcagctggattgggccggtattgagattcgggaccatgacccagtggcggacttccgttgtcctgttcatactcgctccgagggcgtcgacgtgccgtaacatcggacggggcaaacataccaaaagaggctggaggcggaccgtggggtgcttgcggttctggggcaagaggcgcggtcttggggcctgcgtggtggacttgtggggatggcggggttggaggttggtggcctccatagtgaacaatgcgaggcagcagctcctctcgtccgccggacatctcttgcacggcctcttcggccgagtgatattcgcggggtcggctgggggtgtgcgccacgctacccggcagaccaggggagggcatcggcgccaagttgttagattgggaggagttgctgctcgatgcattcaagtggatattcgcccggccagaatcccggtcccgacccaatgcatcggaaccaaagacgtcggagaggggaggaagacgattgtttgtttgggttgccggcagctggtgcatgtgggaggtcgagcccagggtcgggctctggttgacgacatggcgggtcaatggctgcggttggtatctgccagtgaaagtctggtgtagcggagccgattggatgactcgctcgtttgcgaactgggaagcggatggagggacgatggacaggccgttcggaggtctgcgctttccggtcttgggcatccccatcaagttcgactcagaaggcttcataccgtccggaccatcatccttggcggatcggtgcatgcgctgttcaatgatcgatcgctgctgatcccgcacggagaggctgcgctgcagctgctctcgcatgatcggatcgtgggtctggaagccaggcgacaggcacgccaggcctacatggtgcattgaggcggtcaaaggtccccccggagcacgaaccgacaaaccactggaggatggaagactagtcgagaggtctaatttccgaggccggggccgactctgtatccgtggggaggatcccggttccttctttaccgtaatgtgcgggcctccgttgccaccttggggtctgaattatgttaatatgtgaagctccggttccatgaatctctcaacttacggggaagttggacctctcttctcggtcggggaaccgtgtagcgcggatcccactttagggcttttggacatccggggcggagagaacttggacggggtattattcggaggagccaaagatgggaggtttcttgggcttgggttgcgagtcgggtgtggcgatgacaagggggccgccgcggaagcaactgcggtagacatggtcgagacgatgagatcggttttaaggtatcacacagaagattccagtatatagtagttcagtgtgttcagtgtgttccttcagtgtattcactgttcactgtatattgacttgatactcctttagaagatgcaagggcatctggagtgatgcgggcaaagtccgaaaagcggatcgaaacgtgggatcgcctcagtatatccaagtgtagagatatcccacgagaagagggaagaagggcggttaagcgtcaagcggcagaccagagtccagagtccagagttacaagcgagagaaatggacgataaagaaagtccgagagggggtcgacacctccaggcttaggaaaataaaaaggaagatgagatcgccgaagctctccaggggaaggttaaaagaaattaatccggcgataaagtacacagtacgttgatcctccgaatgacaaagaggggaaaaaggcatcagcggtcaccccagctaagtaccagatacccgagctgcccggtggacccaactgagacacgatgtgtttctgtttaggatccaccgattttattgtttgaggattgggatatatttgtagagtacggagaggactgtaattagtataagagtgtatgttgtaccttgtgttttgcacggaggtccctatatgtactaaatcccactattaacaatagtcctccccaactactccgtaccaacccttaacaactatatttatctcgcttttacacttcaataattcgctacacggtggatcccttctctaacagtagtataacaagcaaaccagactagcacctcctgataccaaatttatcgaatcacatccccccacccaacctcatcctgtggacgcttggcagagaaaaaaaacatgtcacatcacctccatccactcgcatggcgttatacgtcaaacaaggcgcagcgggcgcttatatcaaaggggccactagtgtgtggcgtccaaagtcatgcgagtacgaaaacactgaaactgaaactgagactgagaataattcagttattctcacgggttacctatttcgagcatcgctattccgtatagagtaataatagaccctggcctgcctctgaaattagaccgattggcctcctgtcacggcccttgtagatgcacagaccaggggtgcgtgccttgagttgcatatcatctgtgcagttcttagggtgtcgatgtgagatgaaatggctgaaaccgacattaccttgtttcatactataatatacatgtaactattgagattctacgtttcataggatattattcatttaactatcgggagatatccatgtaatatagttaaacctcgtatacttaacccgtcatactgcaggtatgttcaaagagggaatcattatacttccacaggagtatcttatcgtctacggaaaggatctactcccaacattattctgcgcatagtgggggactaaatggttgataaacactgcgtgatccaccacttcgtattattataagaacctaggtgaagacttttcaaaaatacaaacattatcacataaatctataacaatctaacattctaacaatcctattagaataatcacacccttaatcttcgacaaatgcaatttatagacaaaaacagtaggcggtgagacccgactatcgataacccacctttttttcttcgcgataatcttcgacttggagatccaaatcgcgcaaattcgttaggccaaagtccaagcttccaagccaaccgccagcaaagacatcaaccgaccgtcttgcaaatcccaaccacccaccccaaatcccaaacagccaccctcacaaaaccacaatgcctgaatccgtccactcccaagacctggaccagtccatggtcgacgcagagcagcccgtcgagctcctccagtccaacgaccccatcctcgaggagcgacagattgtcgtggtacgtatccgatctgcgcgggtacccaaatagacctcgcgatcataggcctaaagagagcatcaagctaataccatatttccttacagctcgccggcgccaccgaaaccgccgcttcattccagtttgaaggcgaaggtcacactatgggtaatgcgctgcggtatgcgattatgaagaagtgagtgtattgcgctgcgagactagattcggtgtatcgatgttttcggttcatggaattgaggttgaaggtttcggaagaacgtcgctgacttgttaatagtcctgccgttgagttctgcggttatactattccccacccctcggatccgaagatgaatgtccgtatccagactaatggtatgttctcctactgctactttcttgttctattgccggatactggatgtgggatgtggattttactgactggacacagatacgactactgctctcgaggctctggaaaagggcttcaatgatctgatggacttgtgcgatgttgtgacggagaagttcactgcttcgcgggatcaatttaatgcggagagtgggaaccgtatggaggcatgaggtggtttgtttgcatatgtattatttaattggcgttctgggtagggggaaaagtatattttctagctcgggcatgacaagtgcttttggttttttggtgtatagtttaagaaatacttgatgaacataacgaagttattcgtgatgcattctacgaacttattaccaagatgtgtgcagccagcagcaagtctcaagccaggcttgacaggaacgagataagataatggaatggcttattcagacaatatatacacatcatgtctatcgatggcgcagttccttgaactgccacatcgcggaccggaaacgagatgaaggggataggaaatgggagagaaaaaaacagaagggaagctttaattgcgaccctcgaggaaaccagagacaaagttggggggtagccgtgcgccaggatcttcctctgggcggaagtacttcatgacatgagaaagctgcttccagtagttaagggtttcctaggttgatatgatgtcagcatttgatcttgaattgcagggtgactacaacaatggataatcaaataaagacgagaagcattagttctcataattgtcttcttgaaagaatcgcatgttgcaaaggcatattatatacaccgggacagaggttggacctggactaacctggtactcggcgtggctctggtacaacagcacatccacgactggcaattgcttgacgtagcgatgtctctcgaactcctggcggatcttcgtgcggatggcggatacaggcatgccgagggagtacatggtctggatctcgggggactgtacggtgataccaggttagctgagtccgttgcgggtcaaattgtagcctttgaagccaggactgaaaacgagccactaatcaatccgctcctgcgatatctgccaggaacggagtaaagagcatatcaagggacaaggtggatcgtctaggatctcggggtaaactgaccgcgcggagccattcccggtacgacttcaggactcggaatttcgcatcgccccagttgacagctagaaaatgagcagctatattagcaccgtttcgcaggtgggatagactccgctgacgatcccgccgggtggacggcggaacgcatcgggcgtgggagggacgtacaggagcgcgagcgctgcgccagataggtagggttgatagtcatgttgaggagagtcgagtgcccactcaatccagcgtggttcaatcactggtgcagaaagacgggagggaattgaacgtgggttccggagctatgagggtggaggtttcgatctgaggttggtggtggaatgggctaggctcaccgcctgccttttcaaaaaaaatctttgcgaatttggggattatcggaccgtctgcgcgacgttctctgctcttgttttttttctgtcgaatatttttcgatatctctgattcggttgcagagtttattcgatttttcttgggttgttgaagtagtcgcaactctttctcgccgctctatcaatctttgcattcctcaatctctgtccgcctcgtctcaactcagtcaattcttcaagcactacgaaatggctcctaacgtcggaggtgccaagggaggcgcaaagggaggcgcaaaaggaggcgccaaaggaggtgcaaagggaggcaagtctgccagtctggcggctgcctcgcgcgtcagcaaatcgaaagatggtcccaagcgtccccccgccaaggaacagaagaccaagtcccggactgccaacgaaaacctgaagagaaagaagaagagagtatacaccgagaaggagctggatctgcccgagttgaaccaaatcacacccgttggagtgatcaagcccaagggcaagaagaagggcaagactttcgtcgatgatgcggtacgttttgcttcccatgctatgttctcttgattgcacctacggaagtcttatactaatactatcacctacaggagggcatgatgacaattctcgccatcgtgaacgccgagaaggaaggccagatcgagtccaagatgatgaaggctcgtcaattagaagaaatccacgaggcaaagagggccgaggccgaggcccgcatgaaggacaggaagaacaagttcgacgatgtcaaggattccattcgtcaaaagaagaagggcaggggtgacaagtccggggagccaacgagtatcaaggatagtatctcgaagcccgggcgatcaaagaagaagaccgttgcatttgcttaaaaaaagtctgaaaatttgtgtctatactttgattatgtatttagatgtcggggttcggcgttttcaccggtttatcaatctatgtctatcggaacagaaacatcattttgcataaacaccgtccatgctgtggttccccttgtaacccattatgacctgtcgcttttgaacctggtgattgtagcagttggttgggagggcagaatgtttgagaggcaattacagagaggcaattacagccccaaaggtagtgcgagtttgcgtcgcatcgagacgtattcaggcttaggtgctaggtcaggctttttgttggcgtcatcgtggtaggcaatgtttccagggagtttttcagggtgttcaacaacaccagggatactagtgtcaatttcccttgccattttgttgaagaagttcgccaccttaaggaacggttagtatgaagttaactttcaattctaatgtccattgcgagttacataccggcttgacaaaccacctggaccctccaagctcgaaccagccgagatggccaccccacgatgtagtcaacatgactccatatggcgtttgagtcatttcctggtagggcaaagcctctcggcaagcaatctataaagtcagcaatctttcaatggtgacaaaaaggacattgataacttacaggatcatcctcggcttgaatgctaaggaaaggaatcctgatagcaagcatggaatcggtggaagtggcatcacggtaatacgctccctcggtggggtagccccaggtcggacattgcagagctctgttgcatgttagaatcgcactcttttggccagaattaattcttcttaccggtcgaactcatggaggtaggtaatctttcttatcgcttcaacatcgatacgagggtttgtcgagacttgatcaacatgtctgtttcacttggttagttaccttttctcatcagccgaacagagagttactcacgcctcgaagagcttcttcatacttgaccccatggttctgctgtatacctccttgccaatccaggtgctttgcaaaatcatagaaccaatatccaagttccacgggctcgcacaaatcacggccgccttcagttgacagttttcaccttcctctcccagatactacacattttgtcagtgggtatagacagtcaggtttgcaggggtcatacattagtgaggatattggcaccgagtgagaagccaattccaaaaagagggcgattagggaactgcgccctgatccacttcacagcctggcgaacatcccaagtagctcgagcattgtagagaacaccggtactgatgtttgtctccgcacatcctctcgaattgacaacacatgcttcccatgcgccatctttcacgagcggtgccaggacttcccgcaggtatacttcatgggagccaccactcagcccgtgcagaagcacaagcatgggcttggtgtcatctgagggcagcgcagcaaattcatccttagagaaaaaggatgtacgtgatggcagaccacacttttgcgtatactttctcgcttgatccgtaagctccgggtcttgaggcatgtcgtacggtgcgaccacgaaatccatggcataatggcccgagaatgcggggctatctgactcaaaaattttacgtttgtagtaaatggggacatcgtcgtatttcatagttgtccaggctgtctgtaggtgcccattgaacaagaaagggtttaggttgcatgtttctggtgttgcagaccgacagacatccacgaaggtagttttttctttggcacctccagcaccgcagactttggtcaatgtcaacttattgtccgtggcgtgatggaaagctatgcggcccttgggacgaagccatgaaatcaagcccatggcgattagtccggataagaggactgatagggggattgaattcagaagggtcgagatgaggtcgtgcatgaggaatatctaaacactaaagaatgctcaaatcaaataaacggacaaattgatatccaatgactcttagaaaagaaaaaagcaggcttaaaagcacaatgctgatcgaaggatctagagcccaaagttgatatggatctgacctcggcaaaaaattatgttcggattttccgccccttgcccatggttcagtgtgactaagctgattttatgcctttgtatgtgatacatatagttatgcacgatatgtcaggtgatctgtgtcgcaaggatggcttagtcatgattctgagggctgcacgggacctgataacataacatgcgggcgtttttcgtcatgcacgtagtcagttgacaatgtcatagcgcagacacggctgagattaactttgatgcaggaaaccctccttatctggcgcagttgggaggagttgggggcattccgccgaatacgaagtgatgatgatatgatgctcaatgcggcaatcgccttgccgcatgcggaagccctaaatgcacttccggcgtcaagcacagggagaaatccccatgtcttccgacaatagcaatgtccttcttaaatcgaccatggtaaatgtagggtggaaatgttgaagtatccggtgctctgcatatggatcatcagacaaagaacggctaagccaccaataatcagttcctctgcctctttatatgtaatgctgatagcatttacacccatcttttgtgacctagtcccatggtccgtttccgggaatctttatcttccaacagactacttcaaggtcaaaggacctgaacctgctctcttttcttttgaaggtgatgcagcactggttgtcacacgatgcgcttgatgtctactacagcatgataagagtcgaaacgccactacccatcttgctgattcacaatctctcatgaggcttggtcactgaacatatttgagcgacctttaatctaagcatccatggctttaataagagactccccgtccgatatgtccgatcgtctgtaccgcgctacaaagaggttcaagaccatcatcaaaatgagaccctggtcaaagaagcaacaggagggtggccatggccgttgctacctcatggaattacccaccgagttgttgctggagatcgtatcccatctgacagtgttgccggaggctgcgcttgcactgaccaacaagcgcatgttcgcaatctccggagagatcctactctcaaaatgcctccgtttcaatcgcgactttgcgccgcttttccaccattaccgcaatggacataactttgacacgccccggtgggcattcctcaacttgttggaaaacccccgctggaaactatgctccaagtgtttgaaactccaccctcgagccgcattttcatccagagagttgagacggaagccagaaagtcgaacatgcaatatcggagagttagcaggggttgtcgatctatgcccatgcaagaaactaactttccgcgacaaactcgatctcgcggatcacgttcgagtgcgacaggtgacattgcaagccttgaaatcacaatttggggacgccgttgacggccgctactgctggcatacatgcaccgagcagtatggcgcaaccgagctgaagacatcgttgtttccagaaatcaatgccgacaaccagctagttcttcgcacagaataccaactcaccaccgagtcgggccaagtgggcaaggaagattacatgacaccacgcttcggatgtgcacatcgatcggtcgacctgtggctctcgagcgttcaccaaaccacgatatgtcgcctcttcgactcttcctgcccgtcctgcaagcgtatatcggtgtgcagcgcatgtgatacgagattgacatgtccacgaaaagcaccattccattcggagaagtctggcagagcgacctattcattctggacccaaagaagcctcggggggacgggtccagctcctgatccggcatggggagcacaaagaattcatccagccgaaccttcagtcagtgtcgaaaactgcaacgagttgtgtccctggacagtgcgcgagcatccagcgctctcattcgcgccgagtatagaacgggaaataatcgactctggaataggtaaccaacccatcaaccaactgtacacatacatcaacatggtttaacggatttgttcagctgcaacagaggcctagagaagccttgggagctgcaagataaggagttgatggaccaaggttcattttttctctcgttccgacttttgtctatatgttgtatagtgagcatcgtttcggcgttagattaatcttttgttagcatcatgtatttagacatattcatataattcaaccattcaaccattcagagaagaagtgactcccacgtccttatggtaatctttttggtggtctttttctatatctctttttctgggtagagggcggaaaaaacgacttagtctgtgaaaacaactttctatatataacctatgacaaggctggctagtaacaagaagaagagcgagaaacacacaaacgaaactaaaaagcaagcagctcttcaccacacgatcgaaatcgaaagtgtttgagtgcatcagccagtcgtaagccaatattccaatcagctagctcattcttgaagtggacacactgacatggcctttagtcggggctcattacacagaccagcatgaataatcgggttgattaagaactagtatcgtgataccataataaatgacacttgtattcaaaataggtgtcaaggctttggctagtgccaacacttaccttcttttggcttcttttgcaaggtcctttgttggagtcctttggatacatatcctttggcttatgcaaatgtctcctcggttgaaaacagcttaaagcccaagccaaagacaacctataaattttcagatataaagaagtcctatacttcccaaggtcaatgaagtcaaggtaaccgcaacaaaccttatcagctgaccgcccgtggtttatccggaccgacaccaggctccacgcccgcgctcaccatcccgcgcgttcgacttcatactcgatttatacgagtattgttcgtttctcggggcaatgagctacccaccacctggtcccggccaatacccgcattatctaccgccgccacagtatcagcatgggcaaattcccccgcagggactgtacaatagccttggtgctccgccgccatacgataatggctatggcaagccattgatgtatccttcgactatgacaccatacccatcgacatataccccacaaccgcagcagcagcagacgcgtcctccgcagacttcaccgcagcagccgctccaattaccaccacaacctctccaaccacggccacagccaggaccacagcttctctctcaactaccatctccccctccaccccagccgcgtcctcccccgcctcaacttcaactagaagagctgcaacatcagtttgtaaatccgtctcaactgtttgtacaacaacctctgcctactgctccgcgatcccgatacacccaactctctcagtatggtgaaccagctttcgtcccaagttctagtcctccaaaaatatcaccggctgctctgccagctccgccgccagtcaggcctattcacattgctcctgccccgtctcctattactcctaaaccaaacacccaaaccaaccaaggacaagccaataaccatataccgcaaccacgccctatcgtcaaagctgaacctacgccatccaagatctctcccaaagtaaaacatcagaaaaaaccttctacacctatttcgacgccgaaacgaccccagcctgctccttttccggcgacacaggctaccccgcaagtcatggcccgagctccgtctcctgttcaagcaaatattcaaaaccagactccgaagaagcaagttcaaccacaccatattgagaagaagagacagccgactcagccaaatgttgaaaaacattggaagccgacgcctaccaagtctacaaagcctccagtcgactatcaggttctgctgttatccctggctgatgaatatttaaatgctgctcatgctcgtggaacaacgacctcattgaccgctcgagagactgacgttgaggaatattacaagctggttgctaccggattgggctgtttggaggctgtcttgaaggttggtgaattgctctattctaggaacagcgcgcccaagctaaacaaatgatagaactggcgactgcaacctcgcaaagaagctcttgttagacttcgctacgcgcgtacattgtttgaggaaacagacaatgacattgaagcggaaacagcattgagtaaaggggtgtgtatttgtttccctctgttccagaatagcactaactcgagcagatcgatctttgtgaacgagtcagtcaaccgaaacttaatagcgaattcgttttgatttctgactcttatagaaccgtatgcttgacttgaaatacagcatgcagcacctgttagctcgaatgctccataaaagtaaccccaaagcttccttgaaagcggttgatgggatgatccaggatgtggaagcgtatgtgccattccacctttgaccacgggatgctaatatctgtaggtaccgccatgccgcatgggagtacgcattccgctttcttcgagtatcactttcgctgtcatctccgtcacaccaagactccgtgcaagcgttgcagaatcttcacaaaatcacggctatggctaatcgtaacggggacaaggctgtttcggcaatggcggctgtcattgaatcacttgcacacttgcagcaagcgacaaattcggattctatcgagcaggcgcagcgcgccgtggctgtcgcgcgaagccatcagctgaacgatgaacttcgccatatacctcaacttacaaccttaattcaaatggtcgatatctgttgtagtcttctagagtacgacgtcaaccagtctggacagaagttgaaggtcatgcaggctttgatggatgagacactaagcgacagcaactggcgtcccgatgggtcattttcggtccctctcaacggtaaatcggccgggccatcatccatcgacacaggtgacatcttgcaggttcagaatgggacattgctattaagcttcaactggctccctcagcacgatctttatgcgctttgttatttcttaagctcaatcacactcagtgccaagaactcatatgatggtcggaaagccgagaaatatctcgaggaagggcttcgaatggttcaaggcaatttcaaggccccccaagaaatttcagaatccatggtcaatgccaaccgtcgggttcagtggcgtcagtccctttactgcaaccttctcctccaacgagtcttcctggcttgcgctcgaaccgattgggagcttgccagccagactctcaacgaccttcgacaagtcttccaagagcttggttctaacctcctaggtaccattgaatgtctgatggaatatgccgccgggactatcgcacaggcaactggcgatctcaataccgcgctgaacatattccaatcaccaattctgtcactagaccccgctaccagcaagacaggacgcaatgacccctgtcgtgatacgcgcatcctcgccggtcttaacaccgctcttatcctccgtgatccaagtcactcatcgcacccctcgctcagcgcccttctagcaacgcttgaacccttctgccaaggcagtccaaacaagtatatacaagctgcctacttcctagtctgcgcaaccgttcactccgagtctaccatccaaaccaaacagtacctccagcaagctctgcagtccgctactgcaatcagcaacagccaaatcacctgcatgaccctaacattcatgagctggaagtatttccgcggcgtggtcggcgagcaagctgagaaaagcgctcgagccggccgtgcaatggccaaacgagctaatgaccggatgtgggcgagcgtcaccgacgacatgctggctgagaccctggagcgacagggcaagggtgaggaagcgcagagcgtccgcgaagaaggccaacgcttggtatcgggtcttccgccccgtctgagacgtccggcctgattggcttgtctattgctataaacatgatatacgtttttgtttttttctatgtttttctttgcgtttgtttcagaatttttcttaggaggcgctcgtttacgataccatttgatggctaccagggaaggcgtttgatattctgcggttattgacacggtgatattattggcgaatccagaaatacctttctaatacttaagcacggaagtttacccattgatgagtaggaaacgttgacttgaaaccattgataggactcagctcggtgtatatcacaccctaggaagatcactttcgctccctataaaaaagaacatgaacacccgacatcatgcgtaagtacaaacaatatggtataaaccaacccgctgtcacaaaacacaagcttcaccagtcgaagctagacgaaacaaaaaaaaagaaacaaggacaacagcaccgccgaagtcaactccatgcccacaatacgccagcaatgtccaccagacctcttccctcatcaacaaggaaagaaaggccaccctcacacgacgaaattaatattaaactcgaaacctcccccttcctccacataatcgaaacagtcaacggacctcaacccagcccagcccacacgccgcgaattctccgcgcaagctggatatccttctgcataatagtcacgcgcttcgcgtgtagcgcgcacagattcgtatcctcgaatagatggaccaggaacgcctccgcggcctcctggagagcttggatggcatgcgactgccagcgcaactcggcgccgacctcggcggggagcaggtcgagtgcgacttcgcgcactaagcgcgcaaagggcagtttggcgatgagcagatcgtaggagcgttggtagcggcggatttctttcaatgcgacggtgccgggcttgtagcggcggcggcggcctgtgggggttgggtctccggctgggaattgttagaatggggagattgggattgggttgcgcatgtggaggcgtgtaaggcgcttgttttggtgggagagttgaacgtacgttggacgttggcggggctcttgctgacttttgacttccctccttttgtcttgcgtgctttggttggtgttgcatcgtcgccggtggtgggctcggcggcgggcacggcggctgtcttgcgcgctttgtttttctgtgcgctgcccggtactgttttgcgggcttgcttgggcggcattgtgttatatgagaaatgcgctgtaggtatttttcgtagtggggtgttgaaagcgatcaattagaggttgatcgcctggcaaacagcgttctgccgcgtttatgtcgagattgccccttgcaggaactttgtccgagtatcgagaagacaaaggtttgcacttgcgcacgaggattttcgaagggattggatttaatcgtatctgccgacaattgaacagtctttgttcggaaatgctgggaaagctatagcaaccattcgggccttagcgccccagcccccgtgattctcacgtaaacacgcgtctcgtgtctggcacgtgacgataaactggcctacctggtcttatctccgtcatacgttgaataccccggaggcacttggagagctgtcagtgctcgtggtgatcacactcccgctcctttcgattcccgtccgcataagaagtcacaacaccacacgtcatggccgccctctgggagaacaatgggcaacccggccagtttcccctcgagcaatggttctatgagatgccacccgtcacccggtggtggacggtagccaccgtcgcaacctcagtcctggtgcagtgcaacatcgtgaccccattccagctattctacagcttccgctctgtctacgttaaatcgcagtactggcgactcgtcacgacattcctctatttcggacccctcaacctcgacttactattccacgtcttcttcttgcaacgctactcccgccttctggaagaaacctccggccgctccccggcgcactttgcatggctgatcttctacgccatgacgtcgctcctcatcatctcgcctttcctctcaatacccttcctcggcagcgcgctttcatccagcctggtttatatctgggcccggcgcaacccagatacccgtctcagtttgttaggcctgctggtattcaccgctccctacctgccctgggtgctgatgggattcagtgtgattgtgcataagatcgtgccgaaggatgagatcctcggcgttgtcgtcggtcatatctggtacttctttaacgatgtctacccgcctctgcatggtggccaccgcccgtttgacccgcctcgctggtggcggcgtctgtttgaacccgtgcctcccaacgagcgtgcgacgggtgcggctaacgtgaaccgcgagtttgtggctgcggcggcgccccaggttcgatgaagcgtattctttttattgatctagtgtcgctttctggaaggaatttgaggtttcttgtggcgttgaatgggaattgagctcgatctcttccacgaaagacatgtctcgctggtataagcagagccaagggtgcaatgggtccgattctagccttgatgtcgttcacgggtttaggcttttgatatcaagaccgtgggccgtaccagaggggaagctgcatacagcgagtttcttggttacatcagatgacagtatattatattgttcgagttttgcatgagacacttgctgaacgtggatattggcagcccctttaggctgtgtccaacagtggcacgatggagcagctgctctttatctgatgataccccttatctgatcatgtgagacgttgcccttggcccatgctcaatgtgatctatcaaaaaagcaaggagtaggacccgattccttttgtgtttgcaggtgcatttttttagataggaatagccacagatacccagattttttctttgcttaccgcttagagctgcatgcagaccttaagatgacgacatatcaaacagtgctagtacaagagacattcgacttcgctttgaccctcgatagacccttaaagttaaatgaagtaaaccacaccacgtgattgcatgcattgccgactactatcaaagctccttatagaaaacagccaagcatgatggcactatgccaagtctatacagcttcgatcctgcatgtgcatagtatcgacaggcctatttaaaacaatataggcagcgtagttaatataatgcagcctagtcttctatctggttactgtattattattagaaagagtgaagaacactacgtcagatccaattcaggcatcatcatagatcgtacagccccgcgcatttcaagtatagtcaagtcacaccgcaaaagtgccaacttgatattctgccggcaattatgctctccaccagtggaaagttgaaaagtacgagcggtataccgatctcggaaggcggtccatccagggccccataagtccagtacaaaccggtgctatggggccggctaagcaagagccacgtactccatgcctatcatagtaagtgtgtctaagtacgtgtacgccgtacatgctacacatattaccctggtcaatgcatgtctactccgtaccagatacctaaataatcatatgtagactacgaacacaattaatatcaatttatcccaaagagtaattcgccgttttttcgcgcccacatcccgcttatgataagcacggccggcgatctgcgaaatgcttgtacatagtactttacttttcaagtcccaggctccagcccaccgagtctcacatcggctaatcttagaacccaaaaaacggagaatcggccgatcttatcggagggcacatcggaggacacatactgagataggcacccgagttaaaagttagcgatacggatacaacgtggtgaaccgtaggttatccggtggattcgccctccggtcgtgttggcgtaccagagcttagcggggtccgggtggggggtctgtcaaggtcccatggaaacgcgtgataattcgttgttatttgtgcaactgataaatttagccgcggtttgattggcccggtgttctgatgtttcaccaggcatctgcatactgtatccattgcataccctatctatcgagtgctacattggaatatataacatacagagggaataccactccaaatgaggcccataatggaggggcaaggacacacttctaatcgcattgtgcacggccccggcgtgtggcaggtggcggttcacttggcaaatcggtgccaattcctacctcgagtgtggccacgcggtggccaagtcgtggccaaggcgtccgaggctggttctttgtttcatggattggattgattgaatcggccgcgtgagagatagcgtcataaataaatcgggatccaagggcctatgtgtgtacggagtattccccgccacatgggtgcatatgtggcggggagcgaaatacatacaattggagattatgatacatttgtattgctatgtacatacattattataccaagatcaatctggaatagtgccgttgtagtcaaactctgctccatcactgctaactgcataatgcctaggcagagaagtcgggactagagcacatgccaactaccactagcctcccgaggtcgagaaaggtacggtcgaggacatgcctaaataggactagtgcagtacacggtgctcacgttggcgtggggattttccccacggtaatttatttacggtacggtgacgagtcctcaaagttaattattttagcgacattcatggcgccaagggaagcaattgcagttatatataaacgacgtagttgtgtatactgtatatccaatatatcctacacatataattgagccaattcacatccgacggaaataatcaatccaactcaggaatacacagtactgtaagttgaaatatccataaataaattaaaaggttaatcaattccccttaattgccccatggccaacgcgccaatcacatcccctcccagccgctcaatcttggaaccacagccacccctctcgtgctcagcctcgtaatgttctcaacaccttttgtcccttccccgtattactttcccttcacctcccaatcctttttttcctttttcgcctccaatttcgatttttaaacgctgagggtctctcctttccctctttagcttttagtctccccactccccgtcactccttattatcgaactagcctcccctttctttaaatactcttttctccctcctttgtctattaccatcttatgacttgcatttcccgtactttgacctaactacggcctgaggggtatgtgaaacaaccttaatacgaccctaacgactacccttttggggcttcaattggctatcgcgcttctcctattcgatccttaaaccttcaccatgcggcgcggtctcgttatcttccttctcgtcaacctcatcatcctctccttgctcgtccggagtgtctcgaccctactggcactactagtcgaggatgccgcggccgacgccatccaccgcgcggagctgccctcgccaaattccagcctgatcgagcatcgcccccagatcattccaaagatcattcaccaaacatacaagaatgagaccatcccagaggtctgggtaggagctcagcagagttgcattgacttgcacccggactatgaatatattgtacgtgcatgccctttgatccgtcggatccaagctgaccctctgtcattagctctggacaaacgaaaagtcgcgagagttcattgccgccgaatacccctggttcttggacacattcgatggctacagttaccctattcaacgcgccgatactatccgatacttcattctcgcgcactacggtggaacatacattgacctggacgacgtaagtatacctacccggaagaccatggtattccattctaacatcaaacagggctgcaaccgtcgcttggatcctctcctggcttatcccgcctgggtacgccgtacggccccaaccggtatctccaatgatgccatgggctcagtaccccagcacccattcttcctccgtaccatcgaagagctgcaaaagtacgatcgtcactggctcctcccctacatcacggtcatgtactcaaccggaccgttgttcttgtcggtcatctggaaagagtacatgcgcgatgggccgagcgaagctgggcgcgtgcgcatcctcatgcaggatgagtacaacaaattctcttggagcttcttcacccaccaccggggtaacagctggcacggcaaggatgcgcatctgatcttctgggtaagtgacagtctgatattattatcgaacaatgctaatctctcacagatgggtgaacactgggtcttcctcactatctgcggcttcctccttgctggaatcgtcgggttctgcctctggtggagctacggacgtgtcatgctcctaggagccaagtaccgctaccgctactccaaagtatcaggcatcccaccgcgactctcgacgtcgccaacacgccgctcgcgactttcagtcccgaccctcctgcgacgggtcagcttcaaagaagacgaagagtccggcggggtcacagagacctcgtacgaactcgaacgtcgcgatgactagagatctagagattacttctcaactcgcaacttgccattttacagcctgtgtatttgtctgtaacgacacggccggatatgatctctgcatcagcatttattgtacaacttttgctctttctttctgtgtttaggagcgcgttatgcatggtgtctcaatcctgtgacgggatcctggattgaatgctcacctggagcacttgggtttgcttttggacatgtgcgagaccttgtctatcactcggttccatttcactgtcccccttttttttttctgtctattgatttgtaaacaacttggattcgcttctcgggagacagtggaatatatggacatgcctctatgccggattcggatatctccggaaaaatgatgactcgaaatactttggactattccaagtataaaatttaagtatagcactagaacagtccgtgcaatcatgtcttgaaacctcaacccgcaatcctgaaaccctaagttctccaatgacaacaccgtgccttgaatcgccacctctaagcttttcaggtgaacctatcacgtctgggcttggacatttttttaaaaatagtgtactatgtaacacgtccattgtttgagcatcccatttttggtgttttccttgatctaactaacatacttcagtccacatctcgcattctccgcgtctaccctacaatgtactccctccgcctcccctttgtatgtcccagctgcctcggacaatgcaagcccttctttcatgcctgacatgttcgaggacttataaagataatctgctgtgctgctctctacacagcaccaacatcatttctatatcatcctataacagccatccatctgactcttgactttgacattcaatccctacacgatatcgccgttcttctttactactataacctcaaaaatgcacctccaaaccctcctcctcactctaaccctaaccctcaccatccaaacaaccgcaacacccctcccaaccaccctcttcacccgcaaccgcaacaacgcagccctaaccgaatcccaactcgtcaccatcgccccctcctcgaaatcctgcaccgacgccccagcagcaggcgaatgcgccacggcaaaacaagccgcaaagttcacctcccagtccttcgacacgtacaaagtaacctcgaaagccgagcaagccgccgtaatcagcctgatggcgttcgaaagcggcgatttcaaatataataagaatcatttcccgggtgttgctgggcagggtagtgagttttatctgtctaaccttacatctaacataaatactaaccatatccttcagcacggaacatgcaatccccatccttcaacaagaaatacgccgcgtccctgcctgcactcaaagataaactcgctaccgttaacggtcccgctgagctccttgatctcttgcgcaacgacggtgcgacggacttcggctctggtgcttggttcttgaccacgcagtgctcgaaggaggtgcgggctgcgctggctgatggttctgagactgggtggcagcggtttatctctgattgtgtggggacttcggttacggatgagaggaaggagtattgggagagggctgttaaggctattggtgtttagattgtggttggtttgatttgtggctcggagctggttcttcgctgttgactgtgttgagtcttgactgtgcttatgatgattatggattatgggaataggaatggcatagaatataaatgaagttcttttcatggcacctctataatggtactaagtaacagtaacagtagaccaccttgtacggagtacatctatctcattcatctcattcattacacaattttaatatccaaactacaaaacacccttggtactaacaacatcacccgcaccaacatcacccgcaaccctacgcttacaggccgtgcgaatagcaacagcaagcgccttgaacgcactctccgcgcggtggtggtcattatcaccataagtgcaaccaacatgcagcgtcacgcccgctgcctgcgcaaagctctgcagaccatgcgtgatcatctccgtgctcaagtcgccgatcttctcgcgccggaagccaaggttgataaccgcccacggccgactggagaggtcaatgaccgcccacgagagcgcctcgtcgagaggcgcgtcgccgcggccgaatcgctcgagggattgtcgtgcgccgagtgctgctgtgaaggcttcgcctagtgcgaggaaggtgtcttctgttgtgtggtggtcgtcgactggggatttgttagcattgccattgtcattatcattccatattgtagtatagtatcctgtgtatgaactcactgtataaatcacccttcgcccgaactgcaagactcatcccgccgtgcttcgccagcgcgtgcagcatgtggtccaggaacccgatgcccgtgctgatggtgatctgctgcgtcggggtgaattgcgtcgcatggccggcgtccttgggtggcacgatgcctttcttggaggcctcggcttctttggggtctgttggggcggggaagtgggctgatggttcgtagggtgggaggacgccgccgtctagcgagagcgagatttggattttggtctcgttggtggaccgggagatggtcgctgtgcgcgccgggagcgacattgtgggtttagggatttggtgtagggcgaattggcaaattggagagagtcggtgtttggtagatgcccaggtgggagataatcggatttcttttttgtctgactcgttcgcgggagaatcgttgatccgcgcttcagtatggagggaatggacgacctgaggttggcaggtttatgacactggctggtccaggtttttattctgactttctggagatcgatgattctttatattgtcttcgggatttgaaacacatatcttcttcggcattgtctactttgctttactttgtttatcgtcgcactcggcctcgataagaccgactcccatctaaattcattccctctgggccgtacacttacaacggacataccagaatgccaccaccatctaaccacaggggcgatgtcgaacccccagaagaaatcacctgggtagccgcccaaggcttcctgaccggcgcgctccgcgtaagcaaccggacctccaattcgtctctccgtgaactcccagagcaatcactaataccctcaagtttggctccgtgtccatcttggctcatatgattcttatcctgccccaccccttcgtcttctccgcgccaagtccacccgtcgcatatgccccgacacaaccccgtccacgccctaacatattctcccgcgactacctccgctcacgactcttccaccgccccatagagggcttctcaagctggatatccccggggtcccgtgtctaccgtggtctgacgccgcagttcaaggtctttttgcaggtcgtggctatgacgctgggtggttgtatctggcaggagaaacgcgtgaccgagtatatcgagctgctgagacggattaaacgcacggagcgactggaggctgaacgtgcggaagggcatcgtcggtaatcttatatgttgtaaagatttggagacatccactaggttttgcaacgatgtagacttggtttggatggaacttggaacgtgaactttccaccggacacaatacatccgccgcttgggcggaactcggatgagctgaatctcatttctcggtcgttttccaaacctgcacggtctcacaggattgaggcgaatactttgtagccctcgtcagagttactcaccgtaggccgacggaggattgaacatgatcacgtggcgcggtcttggacaaccagacaaatgagcgtagggaacttgtgcattctatagaaaatctagattgctcttgaaagcctgtaaaagccacatgcgcaatgttgaaagtaagtcgaccttgctatcaccagtcagagcgtattgcatgacctcttcagagtcaggctatgtatcttgatttatcgcttctagctcgtcatcttcgctcggtctgtttctactgcgcattgctcttctaccgtagaacacccagcttagttggggttccgaacagattaggatgactctagccttcccagactcgtagcaggtgtagacccttgttagggcacaagccggacaaatagggaatcacccagccccagaaggctctgggcccgaaatccgggaataatcgaagccacccggttctacgcggatgaacatggtgaggatgaccagtacaaactacatcatgagcatcccgggtcgttcgggctgtcatatgtcgaataccaagctcaattattacggggtattgaatgattccacctagcaaggcagccaatgtactaatgtgaactatcaaccgtctaatagttatacgctgtatgactgggctgttgtagggccgaactatactagctttagaaagatgatgtccgtaggcttggcctccgatgctctagtacatctctagtacgaagagcacgtaagaggcgctgcactaggcttgatagtgccgatatagtcggaactacagggattgattgcattagactaattggactcctcgacatattgattggtctttgtactccagaacaaccctgaaagctacgtttgtacggagtatgaactataccccgtcctccggtcatcgttcatcgttcatccccctatacgatctacactcaattgacaacatagcatcataggttcaatctccggatccacccctaaaggaatgatcggcgactatggcactccacgatactgcttccgaaggggtattaatctctcgggcccacgtgaaagggagatcacaatggcaatcaggggggatatccccagacaccttggcgtcatcggtgacgaagttcattcagatcagcggttgtaaggttcactatcaggtcggatgccatgttgtttgggttgatgcctggattatgcctgatccagaccgctttcgacactgtatgtagatatcattggaattgaagctattcccactctaaaagtctctatattcacccattccctgccattgaatctatctgtctatttcaaaggtcctagggttaggtactttgcttgtatggtctctatcaagtaatccaggttctattttctgccggctcaacaggctggtccaggcatcgacacctcaaacctcaggcatccaagtttccccccttcgcacggccttctgacggtccttttcggcgccacctcagatttcaagatataaataagcgatctctgaaagtaaaagaagaagataaattaaaaaataaattaaaaaccctagagaagaaaaaaaagccacaactgaaacatctccagttgatacagttggacctgactgcatccgtccatcctcgattccctctatttcctcctttttccatcttttccgactatccctctagtggattctgctgttttcatttgacgcattcaatttggcctccttcttatgtgaagatatcaaatcacattagatcctgtgcatattgtggattccccccttccgcaaccatcaccgcattcaacattgttgacaggttcctgttgtctgcgcttagatatagggaacagtttcccatcttagcaattgtatgctaattgcttctcatggcgctgtgacgatctatagtatgtgctaccttccccctcatttgctccgctccctccctcctcgcgttattcccccgtcatgacccttcacacggctaattgatccctagtacgaacgacgttgaggtcgtcgagataagcttcctttctcagtacctagcactcgcgctactcttccaccttacgcaactccccctgcttctgtaccactagtccgccctaccgcaccagacatggctgaaatgatcggcaaacgacaacgaagaaagagcctgagcgtgttcagtccatccctcacactatcaacccccctccgacctgcgatccacacccgaacaccctcggatgataccttgacccgggataagaaaggccggcggaattctagcttcttcggccggtctcatagtccgaacagagcgtccgatggatcgaataaccgccgccctgggacggcaggctccgacacccccgtcggcataccatccacaccggtcatggaaacccctcgtccgcggaggaagtcgatgcagaagaagcgcacctcggtttttggttctctgaggtcattgcactcatgggaagacgatgaaacgatgagtccgtccgtcggctcgatgatggacgagcaaagcatggccactccccgaaatgggatctggtcatctgcaatcctccaccacggggaagttcagacgactggaggcatgtggaggaagaagagtcattacttggtcctgacggatacccacctcattcgctttaagaatcaaggcaaagccgccgatgtctttgcttgtattcccgcttcttatacccgacctgcgccttcccatcgccaatcggtggcttcagtcagttctctgcaggatatgcaattcatggcctctggcgattcaactgccggaatcccactaaacagcataatcgcagtctacatgttggaagatgcacgattgtcaccatcggtcgaagtggcctatctcgacgagcgcacaaacaaagccacattggtgcaaatgcagacatctgatttgcaagaattaaacctttggatggtgggcatccgtcaagccgcgcagatggctagagcaaattgtccaatgccatttagcaagggatcgattgagtatgtaacccgtatgcttgagcacgagcgagattacgacccagaggtgttccgcatgttccgtgtcattcaaatcgcgtccagcaagtcaatcacccgctcttcctcggatgacctgacgaagctgtcgcccacgggctgctatctcgccattggcgcacataagctgcatctgctgcccatgcagaagaccaccaatcgatcatcggtcgtatctctgtcagactgggaggccggtacttcatttggtctgatgaacctgactggtttgtcgatggagtacggtgacgacagcctgcatctgatctttaggattcctctcaagaaatcattcaatgtctttttggcctctgttcattccgttgaaatcgcatgttggatccgacaacacactgaataccttcgcccattgtgggtacgacagccatacgaattcgtggttccgaaagaactgcaaaatgacgacaatttcccgcctgttgctttagatgaagattatggatgcttcgaccgaaccttggtcgcctactctgccagttatgacatcgacacatcaaatatacgatatacaatcgaccaggaatgcgaggatgctccatgcttccgtctgctgaagcctgcttccccgaaaaccccgcggtacaacgctttagagctcattgctgtcatgcgcgcacttcgctataatgaattcttccggtcaatctcgttccgcggggtcaatctggatgcattgcagggccttcgtgatattcatggggtggactccgacgtccatctcgaccgaggaggcgcctccgtgcatattccaggccagacaaatctaactgtcctctcgcaagaggtgcgagctttagctctgaagagcaaatggcttcgccgactcgacttctcttactgccttacaaggatcccgacaccaactctggacaagggtactcgtgatccaggctgtgggattccagaagcgatcttccccgtctgtcgccgagaactgactagcgtggactgggttgtgcttaacggtatcaagctaggtgagtccgatttggactatcttgtcgatgcggcttcgcaaaggcgtagtcacctgcgcgctctagaagttggagactgtgggttatccgtgcatgacctagatcttcttctgtcgactatcgtcgcacaagaatcgacacttgaggcgatcaacatatcaggcgtgcagggccgattgaatcccgatgtcctccagcaatacattggctattttggacaaatccgcaaaatcaacttatctcgcatatcacggacctctggcactgaccctctcatcacggccgaaatgctgttcaactggcgactcgaagagctggctctcagtcggacggttttgaatcgcgagaccgtggatgccattgctacttacctggctagcgatcgctctcgaaaccttcgtgtgcttcgtcttgatcagtgtggtctgaccggagaggatgtggctatgttcatgcagtcgatgtctagtgaacctgattccccgcgcagtctccatctgcatgtcaatgagaaccgcattgacaacggctgttctcacgttttcaatgctattgcgaacaatcagaccccttcgcatctgtcaatgcgtatgattgatttcaagaaagaagaccatttccgtgagctggtggattcacttcgaaagaacagcactctcaaatttttggatatttcaaaggcttccctcccatacgatgctagtcctgagacttgccgatcgttgcaagtgatgctggaggagaatgagacgcttgaggctttggacattagcggtgacaacgcgcaccttgatgttgcacgcttcggcattggtcttaatcttgcactgactggcctgaagaagaacacatctctaaaggtcctgagaattgaacaccagaaactcggtcttcaaggtgcaaataccctagcctccgtcttagaggagaatgatacactacgtgaagtacattgtgagaacaatgatatcaatctgcagtcctttacggtcttggttaacggccttcggtgcaaccgctcccttctcaccctctcctgcatggatcgggaccgagtcctgtccctggacaaagtacgtcgagaggttgataatgtccgatgggaggctagcaacggcaaccaaagttccggccactcggtccgtcgttctctatatgcagcgatgaccgttggccaaggggggcaagggcacagactgagcaaagcgccgccacctagtgtcgcctcggcattggaaaactctccattcgccaaccataacgttgaactagtcttgcagtctctgaacgagagatgggacaccgaagtctctcggctcaatcgatatctcctccgtaactacaacattgcccatgggattgaggaaattgatgatgattccgccagcattggacgacccgcaacagcggcgagcctgagcacgatgtttgacaatttcaaattcgacgtgtccgtgtcggcagatgagattcgaacgccgtcgctgctagacgagcctcctgctgtcatccgactttcagaggcatccgacaccccatcccagtcctcgtcgtacatcgagtccacctccttccaaacaagacgcatttcatccaatacacgtcgccctcataccgccgctgctgcacacttcactccatccagtcatagttcttcggcctctctcctagctctcccggttccagccgtgcccccagcagttaagaaagcagagagcgtgcgcagtggacgcagttcttccagtactgcctcgttcagcgccggcagtacacgaagcgcatatggcgtcgcctcgtctaccctaagaggcttcctcagcggcaccgcgttgagggaacgtcgccgtgcggatgcagtgcgcccctcacctgtttgtgtcagcgacgacaagccgcctcagctagactggacacctccgaagcttgacttgggaggtctctagagccttccttacaccctcaccctcaccaacacaactacctgtacagaatcctccacacctcacccaacacgaaccgaaacgaagcctggctcggtatatatacgacgaaccacacccaggtttcgctgatatacccttccctgtgaaacatttttatcttattaactcataactcataaatcaacccaaccccatccgaattcccatttctccaaaccggccagttggcactgataccctggcgttgcatttttttttacaagaccgcattctccgggcgttccatattcatttcctcatttccattctcattctgtgccaacatcttcctattcatcttatcgtgtccttgacattttgttctttgttttattgctcttattggaaagcgtcctcattttgtgggttagtgacgctcatgcgtgaatccatggctaatgtttattgggtctggggcttgggctgtttgatattttattgtgttgttttctatgcggttgttcctctctagagcgaggattgaatactgtttggataggcatgaaacactattgttcctttctgtttgatttcctagtctcgaagactgagtagtttaagtgaattggaggctataaaacacaaccatttctatatatgcataaaattgataaacatcccacgaaaacgcgttcaatctatataaaaagcaacgccacggatgtatatctaagcccaatcgaaatacaatacaaatgggagaagattaaatctgatactatacaaaacggattcccatctcaccacctccaagtatcctctcccagatacctagtcgaacctcacatatcacaagaatctttataaacaagaagcccacgctcacgatccttctgatccatcttcttccgccaaacacgtcctttctcagtgatctttttcaaaatcgcgaagaaaccagcatcatgatcctgcacgttcttcttcaacgccacattgcgacgatgcttgatcgcagccagaatatggttgctctcttccacactgagctcgttgagctcgtagtcaatcgtccacctgtcggacgccgtgaaccacgtcggccgctgcaccggaacgccattcaccttgttgttcacgatgagcgtcatgcctagaatgtcctcgtcgaagtcgccgatgtgggggggggtgcgtctgggtacgctcttggttggtttcgggcgtttgggttcggcgggcagctcgaacaggggcttgtattctaatgcctcggcttcggcttcttcggctttggcgtcggattcttcctcgccggcctctttcgggaagagctcgtcggccagggattctactgggggagcgtcctgtagatttgattccgtcgagtccacctctgaataggtaggttcgggttcgagtgactcctctcctgggaacaggaagtccttttcgactgactcctcttctggatagaggggttcgtcttcgtcggcctccacggctgtctctgggatatggccgtcgatgtattggtctgggttgagaatgcggtcctggatggcgtcgatgtgggctttgttctttgtctgaatggcctcgatttgctcgtccgtgacgggctgcgcgacgatcaacatgtagggggggttaccctcgcgggcctcgaagtggaaacgcagggacttcttggggaacttcttcgtggccttgtccaggatcttctcccacaggccgagacttagttcgaattctttgtcgccaaggcaggtgttaggcgtgccgtgcaaagcctgatccatctcgtcgagagggatgtattggaagccgaagatgcgctcgatgttgtgatacgcgacaaagatgccgtccatgcggccaacgcgcacctgcagggaatacttgaggaaggcggcgcggatcatatcgaagtattcgcgttcgtaagactcccacttgccatagcggcgtcggatctcgtagcccatcccgcgctcgtgctccgtggattccatgcggattgaaactaccgcacgggttttcaagtcgaacatgccagtgcctggaagtctgggatcgtaggcgtcgagctgcgatcgcatgaggaatttgccgagggtgctgtagtggtaggactccggagtgtttgcttcttcctcggcagtgatcttgttcgcatcactgcggcggtagcgctcaaactgatcctttggcatcgtgagttgcttctccattgacttgcccagattcataagaatattagcgtggtcgtattccttgtccgcatcaatggcgtaaatatcctcctcttccttataacggaggaacatagcagtcggcgctcgaaggagacgggtgaacgtcctcagagggtcatcgaaaccccgactaattttgctagtatcgacaggccgccacgcggacagaagataatggaaatgagcgagaactgaagtcatgctcgatgacgagccgtagtacttcttcttatttttcttggtgatttcgcaagctgtctcatcttgtgaggaggtgatatatggcttcaaggcactgaagtcaaattccgtcacgggcatgatctggtccaggtaggggtcgaaattgaagactaaagaccgagggtcacgtagctggtagacaccaggactgtctgcttttagtatatcgatcattggtaggagacttagcaactcacttgaaaagcactcggtcgagaccaaaggcgacgcgtgggacaggaggcacggagacacgcacctcttgggtggaagattagctcacattcgacagctatatcagttccaaactcaccttttaggctctgctccgttgagtcaacagacccgcaatctttagacataacgtggtttttgatgaaatcaaggacttcgtcattgtccctgaattctggcctatccgaccacggggtgggtgctggaatatccaccttctgcctgggtgctggtttgtccgccttctgcgtgggtgttggctcattcgaacttgcaataccgttcttagagctggcgtccaatatttgggcaactacattgctagtggacttcaaatcgagcgtgctcttgctgggttcactgagcgctggcgtatctgctggtccgtctgtcgtaatcttagcattggctaagcgttttctctccttggccttggcccttctttcttgtcgtttggcatgtatatccgctgtccgcaaggccttgactttgtctgcttccaccagtgctgcttctatcgatactgcacccgacgtggcggcctctcgctgtgctgctctcgcccgcctcagttccaacttgtatgctgcccagaatgaaaggtctctcccggctataagtgactgctggaactctctgaaggccgggtaatgccgctgtttgtaattgctcttttgtgtggcagacatcccataccatattagagcagtgagctctctcggtttaggttgcaatggcgcgggtttttgaggtttggaagaggcggcatctttcgtgtcttggatctggccctatagcacactctgtcaaaactcatctcacgttgtacttcggatcgaaggacatacattgggcgctagcggcactgaaggttcggtcgacgcgtcaattgaatcggtcttcggctctatttcacctgaattggtacggagtgcagatatgcggtgaaactggcgcaaaccgagcgcgccagggcgcggcagacaagagagacagacatgtcgacttaaagggcctgacacagaccgcaaagaagtccgaagcattcaggtcaaatatcgacagttaatctgggaaagggtatagaaatgtagaagtccccaaatgttgtcgactcaagaattctagaataaaaaaaaaaactccgtcaataagccaccgggctaacctcagaattgcctctccggttttttttctgccaggagattgggggtcaccgctttgctgttatctcgttgccttggtgcctttctgcctttctgcctaaggtgtcaatattttatatcggggagaaatagaatagtgcgaacgatgagacgacagtaggaggtttggatgtaggttttgttttgttttttatatgcttcatattcaatcgggctataatatgattaaatgactacaaaatccatgtttcttagacttatattgtacaacatacaagagttatacattcgcaattgtatagaatcctgcactcttatcccttaacactaaatgaaagacatataaaatcagtcttgaactgtcaaatttgaactgtcaaatccagtaatccatcttctaattagaactatagaatattttatctcaccggccgagatcgctgggtagaattctggggtcggagaaacacccagccggagggcagaaaaaaagttgtgaaagtttaacatcttcgaacttcccattcccgcatacaaccttggaagttgcttctcaggtctctgtgaggtgagcaagtgtggattctcttatgatcaagtctttcccaactgtgtgccctgttccattgctcaatgactcggtttcccttgactgaggggcactaaataccccgcggagttcctatactaattgctaacaccaccacagtcgagacgcttctccaaccatggcctccgaacaattgcgcatccttattgtcggcaatggtggccgtgagcatgcctacgcctggaagctgagcgagtcccccttggtcgacattgtctatgtcgctcccggaaacggtggcacaggcctgggtaccaacagcaagatcaccaatgccaatgtcaagggcgacgactaccccggcctcgtggctttcgcacagaagaaccaggtgaacctcgtggtaccaggtcccgaggcacctctcgttgatggcatccagggttatttccaggctggtgagtcacctttttcttttttttttttttttcttttttttcggttgtttttttcctgcataccaatcgctttgaacaattctaaaaatgcctcacaaaaatagtcggtattcgatgcttcggtccctccaaggctgctgcccgcatggagggctccaagaccttctccaaggacttcatgcagcgccatcagatccccaccgccgagttcggaaacttctctgactacgagtctgcacgtcgctacctcgactccgtgtcgcacaacgtggtgatcaaggctgatggtctggctggtggtaagggtgtgatcatccccactaccaaagaggaagcccacaaggccttgaaggaaatgatgttggaccaccagttcggcaaggctggcgatgaggtcgtgattgaggagtacttggagggtgatgagctgagtatcctcactttcagtgacggttatactattcgctcgcttcctccagcgcaggaccacaagcgcatcttcgatggtgaccatggccccaacactggtggcatgggctgctatgcgcccacgcgcattgcgccgaaagaagttgtggatgagattgaccggaccatcattcagccttccgttgacggaatgcgaaaggatggtacgtttgatcgaaaatgcctttcccaaagcatgttcctaatcattgtctaggtttccccttcgttggtatattgtttaccggtcttatgatgaccaagaacggacccaaggtccttgaatacaacgtccgcggtggagacccagagacccaaactctgctacctctactcagcaaggacaccgatcttgcacagatcatggtggcctgtgccgaccactggctggacggtgtctcgatcaagatcgagcccaacttctccaccaccgttattgctgtcgccggcggctaccccaacgcttatgccaagggcaagaccatcactctggcccccgcacccgctggaaccctcatcttccacgccggcacaactctttctggcaacgagttgcaaacctctgggggccgtgtcatcgcctccacggccaccgccgcgacccttgaggaggctgttgctaagagttatgcaggcatcaagaccatcagctttgaggacatgttctaccgcaaggacattgcccaccgcgcgttccgccagaccgctaacacctcgctcacctacgcccaggccggtgtctctatcgatgccggcaacgagctcgtcaaccagatcaagagctccgtccgccgcaccaaacgccctggcactgacgccgtcatcggcggcttcggcggcctcttctctctacccgctgccaactccgcctaccaccctcactcgcccaccctaatcggagccattgacggagtcggcaccaagctcaagatcgcccacgcaattggtatccacgacaccgtcggcatcgacctcgtcgccatgaacgtcaacgaccttgtcgtccaaggtgccgagcccctcttcttcctggactgctactcctgcggtcaccttgacgtgcccaccgctgcggccttcgtcaccggtgttgccgagggctgtgtccaagccggctgcgccctgatcggcggcgagaccgctgagatgcccggcctcttcgtcgacgactcctacgacgccgtcggagccgccgtcggcgctatcaacaccacgggcgacaacgctcgtgccatcctcccgcacacagaaaacatgcgctctggcgatgtccttctcgccctcggctcgtccggcccccactccaacggctactctctcgtccggaagatcgtcgagcgtgccggcctgagctacaccgacaccgcacctttctccatgcccggcctcgacgccggcgtctccgtcggccgtgccctcctcacccctacccgcatctacgtcaaatccatcctcggcgcactcaacacccacggctctgccattaagggtctggcccacattaccggcggtggtctcaccgagaacattccccgtatgctccccgacaccctcactgcgcaggtcgacgtcagcacctgggcccagccttccgtcttcacttggctccagcgtgccggtaacgtctcctctgccgagatggctcgtgccttcaactgcggtgttggtatgatcattgccgtcgaccccgcccacgaggctgctatccgtcagaccttcgaggctgctggtgagtctgtgtaccgcgttggtgagctgcgtgctcgtgccaagggcgaagagggctgtgtgctgtctggacttgagtcttggtctgcgtaatattcacgatcctgacgttaaaatttgatattgatggtgatgttgatgcgtgatgctttttatatatggatggagaaaatgatttgcctgggttatctacatatcttatagatttttttgttactgtttatttttctggttcttcgtattccccgtctttcttctctgccttttataatataggacttttggatgagtcccgaactaatggattttcctacgtgcatgagagtatatatattggaaaaaaagtcattgatctatatatccaagatttctgtattgttcctattcccagcatatctgattgaatgcctgaaaatatatatatcggcgataaaggtctgatgtaaaaaggctaaaacaacgatgctcgaaagtcagtaatgcataatagacaccacgattcaacaagcgctaaatctctcaatagcatttatagaatacaaaaaaccagtggatggaatattcgaagtcagagttatgttaaaactacggacaaaatcgggcaatttagctgaagacaggctagaacaagacggacgatggagacgtcaagagaaaaggaaaacccaacctattccccatagccaaccaactccatatgcatcctcaccctacaggtacactgttgtcgccccagcgccagaaactcgtccagtcaaacaatcagagaggcggacgggacagcgcattcgaatgaagaaaagaaatggagggtaatggtaaaatgtttcaaagcagagatggatggataggaagatcgaggtaaagagtaaggtaaagagtaacaaaaaaaaacgatcgactctattccactaaaatcgagattccattttcaggctatccgcttgataatgcgagtccaacaacgcttgcaatccaccagtgcctccatcctgctttttgatacaccaggaaagtacgagtgaatacgagtagaaaagtgcaacaagaagcttagaagcacttgcggtggacgatggaaggaccgctctcgtcgtactcctgcttcgagatccacatctgctggaaggtcgacagggaggccaggatggatccaccgatccagacggagtacttgcgctcggggggagcaatgatcttgaccttcatggaagaaggagcaagagcagtgatctccttctgcatacggtcggagataccggggtacatggtggtaccaccagactaaaagtgtgttagtgggatgttgcaagttcaaccggggagaccttttcttaccatgacaatgttaccgtacagatccttacggacatcaacatcacacttcatgatagagttgaaggtggtgacgtggataccgccagactcaagaccaagaacgtttggctggaacagagcctcgggagcgcggaagcgctcgttaccgatagtgataacctgtccatcaggaagctcgtaggacttctcgaggctggagctctgggaagcggtctggatctcctgctcgaagtcgagagcaacgtagcaaagcttctccttgatgtcacggacgatttcgcgctcggcagtggtggagaaagtgtaaccacgctcagcgaggatcttcatcaggtagtcggtcaaatcacggccagccatgtcgacacgcgagatagcgtggggcagagagaaaccctcgtagatggggacgacgtgggtaacaccgtcaccggagtcgagaacgataccagtggtacgaccggaggcgtacagggacagaacggcctggatggagacgtagaaggcgggtgcgttgaaggtctcgaacacgatctgggtcatcttctcacggttggacttggggttgataggagcttcggtcaagagaatggggtgctcttcgggggcaacgcggagctcgttgtagaaggtgtggtgccagatcttctccatatcgtcccagttggtgacaacaccgtgctcaatggggtaacggagtgtgaggataccacgcttggactgtgcctcatcaccaacgtaggagtccttctgacccataccaatcatgatactgcgcccatgttagtatatttttattcattgagaatcaaactggctgcatggcgtatgtgtccaaaagccaaaaagaaagggggggattatttacccatggtgacggggacgaccgacaatggaggctgttgaatttggtcagttatttgatcctcacattcaaggtttccagccaagcaaaagaggggaagccatccgacgcaagggttggtgggatggcggccttcgcaaaggaggggtgtcagattctgtggggttggacttacggaagacagctcgtggtgcgtcgtcaccggcgaaaccggccttgcacatacccgaactacatcgcaaatcatcagtatcataattcttgtagttttggaagcgccatctcgtaattgtggagggagatggaaagcgattgggatggattccatctgccgtcatgtgggcgaattaggggtggcaacgaccgcgaccgggctgatttggtgaccaggccgaaacacaagccagaagctcccgggaaaaagcatagcacatacccattgtcgataacgagagcagcaacttcttctataatgagatatccgggttagtggtcattcgcaaatgggattcgagctgtggcaacagggggcagcttcctgggaagctgctgatgtggccacatcagaataacataccctccattgtgacagattaaacaatgaacctaagggagagggggggatagaaaaagaaaagaaagatggaatgaggttagaggggggatatagttgggattaggggagaagggaagaaggaagagagtgagggagcgagaagagtggagaggggtttgtgatggctgggattgtgcgctgcctgaggccgtcgattctcttttgaccccctccgatctacaggttttggccgtttcttttatatttctgatatctacaagttcaggataaggcagaactattttcatctcattattgcactgtctcggacccctttcttgtctacctagagcattgcgtggacactcttaggggtgagcctccagacccctccggggaacacgtaccttgaccgggttaggcactctagagtgtttagttgtattacagttattacaatatcagacatgcgacaggcatatgattgtatatcgtactccgtacatacatgtaggctacgggattccctgtggcgtggatgttctaagtataggacagacccagacttcagtcattggggtactcccgttccaaggttatttcaagtggacacacacgcatatacggctgtataggggataaccccttagaccgtgagactctgacactgccagataatttacgtcctcaggttgttaccgctacttcaccccaggcctaaggtgacaactaagcctgttgtaatagtgagcggtgaggtggtgccacgtgacatcttgggaagtacgagatgtacaccttcttttctccctgactacccctgactttgtctccttatttgcggagtaggtatctcctgatttatacatcaaagtactattttggaaaaccagcctatgctgaccatctccatggcagaaaacttggcatttgacccctccatcggcaataaagtcgctgaactttaagccccttggaatatatcttggcagcagaccaggctttgataaccgggttctagtacattccgaggcacgttgataaaccggaaaaaccatggccgagtagttctattgacatgcagccaatccgcagcacaagtgtttgattattcatctactctcactgcttactttcattgctctcccctcattgctcgaggaatatcgtttccgaaagcctgaagttcgctgtatcggaacaacgaactctacaagtgctctagtcggtctctatatatcgagtccgaaatggctaagctcaacggttcaagagaactactagtacgtagtaagaatgagccattagaaatcacattcatgccattcaaaccgccgaaacaagacttggtgataactcttttggctttcccaaggtcgttttagattttcctattcggtagccaagaagaaagaagacatcagtctctgcttcggctttctagtgacaactccgtgttgtgtgtagtcatgatgtagtctagttgggatgcgatcacatgatcgaacccgctggtcgtcgcgcgaatcacccagagccgtggccgagacgtcagattatgtcagcgggtcttttttctaactgtagaaaagagtattgatagaagaccgcggacaatactgtgcgataaacagcaattcaatttctgacttgcgtcatagactctattcatactctccttctttcctccctccccaaaccaatactacctaatcaccaacaaccaattaccccgccagcccaccatggaccccgaaatgaacaagctcctcaaatggagtgttgccaacacacagccagctgcaggcgccgatgacgagagcagcagtgcccaaagtcgcccagcagctgcgtcaaacctgaccccacaaatggtgaacacactattcggcggtccctccgaggccgacctgatgcgggccgcaatggaggtcgtacacgacgacgagtccgacctggagaacaagttgatcgcattcgacaacttcgagcagctgattgagggaattgacaatgccaacaacctcatcccgctcaatttatggaagccgcttgtcgagcttctccagcacgacgagactgaactcagacgtatggcggcctggtgtgtgggaacagccgtgcagaacaaccccaaggcgcaggatcatgtatgaaaactcccgattgacctacaagcatgttgaccaaatactgacacatccacagttcgtcgagctgaaccaaatgcctactctcgtcaatctcgccacgacagactcagaccccgcaacccgcaaaaaggccgtttacgctatctcctctgcggtccgtaaccaccagcctgccttggatgctctgcacaagagccttccagaaggctatcccaccgataagcgcgatgccgccgatatggaaggcattgatacgatcatcgatcagctgcggtctcacccgaccgaagcctccgcatgaatggagcgagttgtgactggactgaaagagtgaatacacaaaaatacagaggcagcagggtacccactgaatgcgagtccgttcttggaactggccttgtatcgtgccaagggctggggctcgcaatgcaacaggcaacatattatgttgctactgcaactgcgttgaatgctatgatgatgacgacgctaggcttcactgctggtaaatgcctgcgattatttgatttgcggatatccgaaatggttctgcaatggtttcttgttgcctaagagttgcatcaacatgaaacaacaacctgattttttgtggttcaagcatagatttgaattgtacataccccggggcttttgtcctacattgaatgcaatcacgagttccgacgatcaagaatgtcaaatcccgatgtttgaatctgtacctatgctgcctaaactggaccgtttcgttgtagcagtatgccctaaagaaccaaattcacactgtattgtagctcattaatgaaatatctcaagaaaagcagaaatgaattcatactccgaacaaattagagctcacgttgccttgactgatgatatccatagatatctcggaacaacatttctccaccagacatcgtcattggacttcagctctcaccagcaacatccccaaccaagacccccatcccccacaatcccaaaatggacagctcaagcaaccgactcttccgcttctccaagccagagtggctgaacaactccgccgtccgcaatggcggcgtctacgtggcaggcgcgctggtaagcatccgatccacctccggcctcacttgctcgtcgcagacaccccaagcccaaagccctcaactccaaatcaaaataaaacagaattgaacataacatctacctcaaacaaaaaaccaaaaacccaaagagctagaagctaacaaaaccacagttcgcagcaggcttcttcttcctaatcgacgtcgcggcattctcgcgcagcccgcgcaacggctcagacgtgcatatcaaattcgtcgactggatccccggtatctgctccgtgctgggaatgctggttatcaactcgattgagaagagccggctgcaggctgatagctttagttacagcgggagtggggttgcgtggaaggcgagatttgtgctgtttttgggattcgcgttgcttgctgggggattggctgggagtgtggtatgtatatctctttccccctcctactatactacgctttactgactcgcttgttcgtagacggttatggtcctcaagtacctcatcaaggattatccgatccagacgctctactttggaatcgcgaatattgtggctaatggccttgttatgctcaggtatgtgtcttgtctgatttgttattcgagttgtgcatgcgtgctaacaatgctattctcgatctagctctatcgtcctctgggtctctcagaacattgaagatgactacacctacaatctggcactgtgaggaggactgtttctatctataactggtctttgtgtattctactcgatttttgctctgatgactttttgctgggatgcattatgctttcacgtcttttggctgggattggcgctttagcatgaattcattcacattcctcaatgttttgcgtgttctcaagttaggagtccttattatgacagcctctgaaatatctagaataccatggtattctataagtaaacagtaaagtaaacattatcgagagaaaagtatcatttcagctatgcatcaagaaaccaaggcctaaaagaagcccccttgaacaccagatatgcattcataaaatcgtaaaaatcaccattacctcggaccctcaatgctcctcgcagaacaacctcagtaactcatcaatgcaagtcatagccttctccttcttcaagactgaaggcgccactcccggtgcctgcttcaagtacctgcggagcgcaaaagcagcagctttgtacgtcgcatggtacataaccttgaactcatcatcatccgaagtgatccccggtgccggggtttcagcccgcaaagcctccggcgccggcgtcgtgcccgagacatcaagttcaggctccgcacccgcaccacctggcggcttacccgacgcagagcgcatatccgcacggtggaatccatacagccgcatacaagtcaagacggtgcgcgtgatgagagtcttattatccgcaatcacagcatccggatccttagccggcgagcctggcgtggacgccggtttctcctcggagaccgaaagagatgacgggccctggccctgcgacatctgttctccacgtcgcgggccagaatccaagcacgggttcggagtaggcgcgcgcttttgtggatcggcattcagggctggcgttgtgcggccgcgtacgctacctgggcgatgtagacctgctccgatagagacggatctggaccggtgggagacgatccggtcgagagacgggagggtgggtccgtcttcttcgggctcgcgcttgatgcggagtgtttgtaggttctgggatgaggaaagaggtcgtgaaggtgccattagttgtgagacggcttcgccgcctcgctggcggacgcggcggtggtgctgtgcgactacttcgaagagcgttgctactcttttgcgtttggggctgggagagcttatgtctggtaggaactctgcgcagcgcgggttggcgatgggttggtccgggttggagggtggtggggatgggtaggcttgggcttgcgtgagtcgtgatgttgatagtggcacggcgtagattctgagttcatatggagcacgatgtggtctatttctgtgatctgggatctcggagggggatgaatgtggcggggtaggcgggcgtgtgcatgatgctgcgctggatagaacgccgtagactaataggcttgttgtggttgcgttgcctgatttggtgttgccttcgacgctgaccagcagacccactgggcattggaatgattgttggagtgctggatcttcttcgttcagccatagggcgcctgttagcttcctctggagccatcttgatgtccccgcgtgggatgtgtgtagttcgaggttaggaccggcgcgtgcatgcagtgggatgagtgctgggttcacgaagctacggagattgagctgggactccttggatagctcggactgtgagtaggaatttggatcgaccagtcgaatccctggtcaagtggttagcgaggaacaggatgcgatacgcgtatggcttaccttctaacttggagtccgagccgagaggaatggatcctgtccagacattcatcttgttaactggatcccgaaaaggcctttcatgggttcagcatagtgacatcaatctggtatagttgtgtcgtttctaaattgatctgctgttatctccgaatctctgcagacgcgccgagtccgcgcgcggtcacgtgtacaattaatagaccgaatatatcagtaaggtaaaaaggaagcagtaaaactaagtagatttggattcctcgtttttcagaagaattctctatatccattgcgttatagtacacctagagtagcacagccaggtgctggggccattgccatttaaagtgaggcacaccccacaccaaatcactcatacatagcatatcaagcatatcaagcgtacgctgaaatcaaagaaacagcagaaaatcagatgtcatcgtgaaggccggataccgtgagggccactgggatacagtagaagtatagcccttgaccccgcgcctcatccattctggacgatcagaactcctcctgttcctggaagaacatcgagaagctaataatggtgccatagatcaacaagcctccgaaaatcgacatgatcattgctgggatctcgattgcgccgctgtgggcgaggacgacaggaagtgctagacaggtcagttgataatcatcaatggcacaatgatgaggcattaaaatggacatagtgcggcctgaacatcaagaaccgaccggtcgagtgatgatatgtcccacaagaggggttgttgttaaccaacgacgtaccgataccagtaagaaccaagaatccggtcatgaaccgtccaaagtccatcgcagagttgctcgaactgtccataaaatcatctgggtttgcgcatcgttggcagatccagttgggaagcggcgcaacaacgtaaatgccgaccaccagcagcggccagtacctgtgccatagcgcggaagagaggataacgaggaggaaaccaattgcgagaacctggtcaaaagttagagaatattcagatgctaggcgaacagcgaaacgaagcatacaaaggacagggcgatgatggtcttgagtccagcggccatgattgcggagacgccgaaagccgatcgatgagattaaagatgggagacgcaggagccgttgaattaggtggatccaggagacgatattaagagcaggtcaacaatggcagccccattggctgagtgcgggaaatcaaagaaggacagtcgtgcgacaagctggagatgagctcgagaatgagtgacgttggcgcctgaaggtcactggatgttagcgcctgaggcaccaacagctcatgcttcacaccgcgtcactttactgcctgctccagctcccccatcctcctccatcaccggattatccctcggattcttacgtcgctgttcctgaatctctatttatcaacaataatccactttctctgtttgctttgatatccattcaacccttcccgccacgatgttcagaaacaattacgacaacgatgccgtcaccttgtaagaccaggtgctccctcggattcatcagatgctgactcaaaggatcctagctctccacagggtcggatatttcaagtggaatatgcacaggaagcagtgaagcaaggatccgtcgtcgtggggttggtgaataagacacatgccgtgctggttggactcaaggttcgcatacctacagcagagaacgaacagaccaaaccgtcaaaactaacatttggcatctagcgcaacgcagaagagctctcctcgtaccagaagaagatcatcgagatcgactcgcacatggcgatcgccatcgccggcctcgcatcagacgctcgcgtcctctcaaacttcatgaagcagcagtccctgggctcgaagatgacctacggtcggcccattcccttggaccgaatcgtcgcccagatcggcgaccgcgcgcagaccaacacccaacactacgggaaacgtccgtatggtgtgggtttgttggtggccggtgttgacgaggccggcccgcacttgttcgagttccagccctctgggctgacacacgagatgcttgcttgtgccatcggtgcccgttcgcagatggcacgtacgtatttggagcgtaatctcgacaagttcgaggactgcagtcgtgacgagctgatccaacatgggttgagcgcgctaaaggagacactgtctcaggataaggagcttacagtggacaatacttctgttggtgttgtcggtgtgactaatggcaagaaggagagcttcaagctgtacgagggccaggacacggctgtgctactggaggtgctggagcagcgtgagtccgctggtgcggagggcgagtccatggaggttgattcataaatgtctggtttgatttaatgattcgcatagacacgaaattttgataatgctttgtcttgtgtttgcgtccaatgatctcagttatccaatcatcaattcataaggctcttctcaacgaagtaatctatttgtatgcctgaagtctttcactgccgaaacccgaacaaatgcgaaacaaacccaaacaaacaaaacgacatctatatactggtaccccattgcttgatgatcaaacagagcagcttcattcctctccccagttcaactgcatccgccctgtgctgacccgataagccagcaacttcggccagacctcagagacctccttggcctccgcaaggatctctccattactagcactgatatacccctcttggacggcattgcgcacccaagccaacaagccatcccagtagccattgatattcaacaacacaaccgcaaccttatgaatgcccagttgattccacgtcgtcatctccataacctcctcaatagtgccaaacccaccagccagcgaaacaaacccagacccaggcccgccctcaaggaccttcgtggccatcagacgcttgcgcgtatgcatgtcggcgacaatggtcgtaatgccgtactcggactcggggattccaccggtatgaacagcatcagagtcgaccacccgctcggcagctttgccggcttgcttggcagtggactgggtttccatgtgctggcgcatgccgccgactgttgcgacttcgactagtgcacgtgggatgatgccgtgcacggatttcgggcccgagagcgagactagcgtgcgcgcaacttcgcccattaggcctgttgtgccgccgccgtagactagttgcacgttgttcttgtggaattcttcggcgagcgctcgcgctgcttccatgtgtactgggctgttgcctggtacggagccgcagctggaaacccgaggggggtttgttagtgtatagttcaagacatgaggtacacacgccagactggtagacgatacggtgtggttgtggcattgaaagtggtggtgaggggcacgactcacaatacacagacgacagcgggtttggtctccgagtccgccatgttggtatggtaattaggggctgagtgtatgaacaatgaagaggtcttggaagggcgttaattagagaagaaggaagagaacagcaagaggcaagaggcaacctgggaccaaacaggtaatcccccactccgataagagataacgtagtacacataacatagtataacgtcagggctccgactttgttcttcaaaggaccttttgatgtaagatttccaaataaatgcctctatatatgttatatattgcagctcgattttgtgttgtatgtttgcgagagtccagccactagttagtacaacttgaattaactgactagggcttgtgtacggctaaacaacacaacagctgggctttttatatcaacactaaacattcagtatgatacttataacaattttttggctatctaggttgtagggacatgaggctgtgatcggaataagctatatagtcacagatttatacttcttggtacctcaaaagccaactttatttaggtacactcgatagcttcaatattatgtcctcttctagttattgctattagtcaacttcatagtactataactaggtcaaaagaagtcgaattaatactctttgtttattctcttaatgctttttgagtccatgcagcaacttgagagtttgttccaccgatggagtataaattcacctaaaaggggattgttaagatcacaagagaaaattgattccattgttttccgttgccatggcttgaataaaggttgttcagtcctagagacttgttaaattgccatttttgtttcttatgttgagtatcatacatggaagcctatagaacaatttgctcttatagacaacttgattgttgcctgggtctatatataaccagtcacttgcccttgcaatacaggatgctcctcttcttttattgattgtcttatagtatactggctatttatatgtctatgcttatatatatgtctgtgttgaaatacgatttcatcaattctgtcaactctctccatcatccagggaaagcctcagttatatgaggtacctggaacaagttttcctagtgggaatatcggagtttccaccgtttctctcattcaagataaaggggcgacatggcgatacaaagtttgacggaccgatactgagtccctcacctggtttcacctttcaccacgacggcaaatgctgtggctccttctgtctgtcatactttaggagctgtctatttccacactgtgctgactgtgagccaatgattcggacatggaattcgtaggaagaaagaagctatcttccttgcttcctcatgctcaatcatcagcactgacttcaagacggtgtactcgtggaaggcatttatctttgccatcttcacactgctgccgtgggatatgttgatgtcgtcggacggcccttcgtgcttctggtgctcgcgtggcgcttgtgcgtgccgtcgagcaggatgtgaagtgtctttcccgttctgtcaaccaggcgaaaaaggctgccgcacttgcgctagagccgtctgcgacttctgaggcggaaaataccgcagcacccgcattgaaagagtctgtgacttccgaggaggagaagttttttgatgctcccacgcatgccgaagtttcttccacttctgtctcagacttacagaaatgcagctatgcttcacagacgcgcagtatacgcacttcttgatgatatcaaatcgggctttatcacaacgcagtgcccacaaggacagtgataaacagagcagactcattattcaagaccttggtacaccaagtatcaatttcgacactccattttcatctttggatatgcctggctctcccttctatcctttacatctttagctatgcgactactaggccacagagaaggcaccgaaaaagagaaagatgagctacagcagctaaatgattcgagagacaatgaattaaagctcagcgatcaggcaaagatatgtatgccaaactcggctgatagcccctagataccagtccctgtaaatgctatgcccagcacccaaacgcctagagatgcaaaaaaagggtatcaagtaaacaactcagctgacgatccgggccttcttcctcttccccttatcacttgtagagctaggcggcgaattgctcttatcggaagccttaccaggcgtctcgacgcggacctgtggcgtcgacgctctgacaggcagggtagaaggcgtactagtcggagccaaattagcagcggtcttcggcgcacccttaacagccgaggcggtagcctcgccgccagtccgtgataggatgaacgatcctggttcgccgacgagggggctctcgtccatgaattcgtcgccgtagcgcgtgagcaggctgaatgattcggctagactgcgcgtatcttgatatttggagcctgtagatgagccacccaggcctgatttactggttgattgggaggattcggtggctgggaaggatacgtctggcatgggtgttgcttctttgctctggggggcttggctggttccggcgggctctttgctgcggactcccggtggcaagtaggtgtgtccatgggaggcagtgaatgttggcaatgtcgcagcggatttcatgagctgggttagggatgtgacggctgatagctgcggggaaggattcattagaatacttgtctcggagcggttcgtgagttccgaggcaatacatacaattcgattccccacaacactcgcaaccgaaggggccatgtagatgcagtcgccgacaatgaagtatgtagctatcacggtcacctcgtcgtccatgccgctcctcttccgccggttctgcttgcgaatcacccagatgttggatggctcgtgggcgaagcgtgtgtctgtctgtgcggctgcttggagggggtcatatgacacgataaactccagaccctgcattgttttcagtcgggcttcgaacgcttcgcgcgtctcgacgaaatgacggaaggcatcgttgtagttggcttggatggcgagcgaggcgttgttggaggtcgcatcaaagaaaggggattcggcaaagtaaaatagaactaattgacgagaagattaatctcaagtccaggtgtggtaaggtgtacaacccactgttgttggaatgaaggaatcctcccatcatctggacgtgcgggggagaccgccagaggatctcctccattgaggcatcttggttcgccatttgcgactccggaatgatagaccggagtcaactcggtctatcaaagctcgcgacaagctttatttttgaaaatgacgcaggaggtgcaggaggtttaaggaaaagacgcagctcggaagttgaggctgcggagaaaattatgtttgctttgtttgcatgttgacagtatatgatggcgacgggggagaaagagctgaatatacgtacttctaatttctacagttaaatggactatatacacatatacaggtactgatacaataaccaaaggcaaccaaaacgccaacgccaacgctgaatgttgaatcaaatcactatcccatcgcatggatccggttgttgaaagcagggaaaagcatggatcataatgcgatcaagcataagtcaagatgaccaataaacaaagctgcgccgaatagttaagaagtcgtagctgatctctcgtccgcatcaagcggcgtgaagacgttgcaaactacacgcagtttggtcaacatctcatcccattcgccctccgctgtgctgagtgcggtaatggcacccccggcgccgattcgccatgtctgctgcttattctcggtgtaatctcgaccaccagaacaagtgaatgccgagcgaatcagaaccgagaagcttccacctccgccaaggtccaggaaacccatcacaccggagtaaatgccacgcttgcgattctcaatcgtgcaaagatgcatgcaagagcgttccttaggcgcaccagtcatagatcccggtgggaggcaccgctggagggtggtcaggccgtggacggacatgttgggggtattcaggtgagaaatatgtcgcacagcgaaaccaggatgattgggccggatcttgccctttatgtgtgtgatcattgagtagactcggccgtaatctgcgacttcgagcagcttctcaacatgaacgccacctgatccgcagatgccgtacagatcgtgccggatcaaatccgcgatcatcagattctcagccatctctttcgtggagccgaggatctcacaggccttctccatggtcatatctggtgattttcggactgtgcctttcattggcttcatctccagtgtcgattcacggtcccaattgaggaaacactcaggactgctgctggcgatctttgtatctcctagatctgcgaaagcgctgaatgcagcgggattgtatgttttgagtcgtctgtacagcttccaggggaacatcaaacgatccgactctaattctggaactggcaatgtgattttcgtctcagaggttaggcataattcataagattcaccagcttccagctccgctttgcatgactcaatttgtcgtttgtactccttttcctcggggagctgaattttgctctcccggagaattgagtccaagccccgatccgcagatgtatcattgccactgtccgaaaagttttgcagctgctgcagtgtctcatcaagccaacccgcatcatcatcgcgagtggattgaataacaacagtgccagtagtattgtcaaccacgacacttctttcacaccacagaaggctgacatcgggtggatccgcaaaggaaggatcagatttcccggtgctggagtgcttaggtgacttagaagcctgcgcatggcccgtgtgaggaagacaagtgagaccaagttcgtaggagagataacccaggaagccaccccagaatggcacctgagaatttcctgaatcaactttcttcatttccatcaaataccgtaaggcatcccacaattgagcgactgtaagataactctcaacctctttacagtcgccatacagctggagcattcgaatcttatctgtctcaacattgtattcaaaccgccatgagccaggactcggcaccgatgcgatactgtattggccattggattggaaaaggactgctggtgaacctggtttgttgaacacttcacttatagcctcggcggtcaaactaggccggtcgagggaccggaaagacgaaattttcgaagttgacttgctccagttgaacatatcataagcaataccagggaatgcactaggggctgtgtgggggctgatgactgtgctgggaagggaacaatatcccccgcgtccaacgagcttgttgtatccaagagccatcttccaccaattccggagcagtgccttgcaggcattgatttctgatttgcaggattccgggtggaattgaacaccccagaatggcttctcaagatggcgaaccgccatgggtatctgtgtttccggacgatcctttagagccagccaagccaaatattccaaatcggtcgatgttgaagcagccgagttggcacaaagtgagtgataaagcgtcacctctacttccggtagatcctcaaaaatatccttagccgacgtggaaatcttgtggatttggccatgaatcgggtacgggagtcgttcgatgggaacgccatgatgaaggcaaaggctttgaaagcccagacagataccgagaactggaaggagctctgagtcatgaaggtcccaaatatctttcatgataccgacatcactaggcacgttgggatctcctggtcctggaccaagaacgacagcttcgtagtgctggagaaactctttcatattggaattgggccattctgaatcgatagtcattattgtgactttgacccccagggtctcctccagcatggcgacaacattgtaggagaatgagtcataggcatcgacataaaggatgctcttagtcgaggagctgggatcaagttgcggcactctgctttcattgtttggggcatcccaatcaccgagcattggtgccatgctgatgtttgaatttgatggcgaactataccggagaatttcgacgatcccggaacaagcactgggatcaaatcaaatctcagtgatcaaagctcatctgcatagcagatcttcaatccttagcgttgaattagctactcggagcaagtttgccgcttatctgatggagcgcgatcgggagtggcaatatgctcagaacatgtcccaacgaagacaacaaaaaaatacttagaagtatagccttcaaatgaggacgttaaccatgaaattgaagatgcgagtgtgctaacaatgcattgttgttgaagcaagaaagaaaaaaaattaaggttgcgagataaattcgaaggtcaaaagcgggtaccgacggaagtctcgcggatgtggcaatggagggcaatggattttgatattgggacattttatgagaatgactttggaagatcttgattattttacttgaagcccttgaataataaaatttcggtgagaagaacaatgtaatatatcaaatactactctctgtaagctcctcaacaacgcaagaggtatatatagccacgaagttagacctataaatagacattcatacagggtctgggttgtatcatcctacatgtcagactatagagaacgagggacaaataactagagtgcatgataccggtcaaattccaacatgaggtgccaatatatcataaacacatttatgggaggagatatccttgaaaggattttcacattcactatttgcaaagaaaagaatcaaaatatttaattagcaaggctaatgcactttccatccgaatagaaaggccaatagtatttatcaaggcaaaatatcaagactgtccaggctgagcagctggggctggcgcctgcagcgaagcgagcttgacagcaaccttagggaaatattgcgtcacaaagccctccgtgtagaagctgtgcgcagaactgtgatctccgactaagttgtgcgctagctcatggcacagaatcacccaccaatacacaatagcatcagtgcgatctgggctcgggctattgagtagctcctgctcttgcaaagactggaagtaaaagtagttacagaaaatactgcccgcgcgattgaatgcgatcgtcttgccgcccgggtcatagaagatggtcaggctgtcggcccgcatcgagaagatcatgccacagtcaaggaggatagacgcaaagaggttgaacccaatgcggtttttcgcgaggaaggcagatcgttcggtgactgcctttgtgaagaggacgttcatgccactagggagcgtggcgacaaattctagatcgtggcttgggcgctcgtcacagtaggacttgctttcttgaatttgatttgtctctgggcggctgtacacgtcggaggatccatgaggtcggcatgcttggacggcggagagaagctcggagttcaatcgatgcggcgaattgccatttacaggttgttctgggcgtttttgctgagtctgggggtcattgggggcgtaaggcggtggaggtgtggaagacccaggaagcagagatcgggattgttcttcagtgccggagtttgagcctgacggtctaatatctaagccaaatcgtttcgatagattgccaaataagcctctgggtcgcttcggcattgtctctgggggaacggcatgtgcttcttctgacaaggtcttctcgtttttcggggattctgggaaaacgccaggcatcgaattttgtgtctgtgcttcggccctctcttcgtcggccagttgagagtcacgctgagcttgccccgccgcccaggaagcttctctctcttgcaaagcacgcctctcctgctcgatctgtttttggcgtttatcttccgcgacccgagcttcttgggctttttgcttcagaatacgttccacgttgtaacctcgagcccggagttctaagagatcggtcttcaatagcatttccaatgtaagggtagagtgcagcttcggtcgcttcaaaatcaactgcaccaatgcctgactgatctcatacaggtcgtatcgatctggacagatgcataagccaacgcctgaggtcagccgggcgacaatcgcattctttttctgcgtgtgcgacacccgtcgtcctttcagcgatcttgtaagactgatcgatgtcacaacctggactttgaaggaatgctccaaccatcgggctccatgcagaacatagtctgcgggctgatcatgcaagaaaagccgcgcacgctctaggatcaatttctctagtttgtatgcaggggtttgatccgaggcgatactaccaattcgtgcgtgttcttcaacaagtccacttaagggtatagccccaagagtagcgtagaagtcctccaatgcctcttcttgtggagcggcaaaaatgtgttctttgaaaaggttgaagctttggaaatcgtctaccacgacaatgtctttggcagaggcaagacaccattccttgatgtccatatcgtcctcctcatcatggaactccttcgacttttctttgccaccatggtctgacgcagagggtgggatgtctcgactagcaagaaggaattttgctctctgcatctcaacaaaaagatccttatccttcttcagcaccgggagcacctccgcgagagtcctgagaagcatgagatatttctccgaactttggaatgctgcagatatgcgtgcgggttctttgaccaacatgcgtgcaatctcgatcttagtcggttctcgttttgagccgatggccatgaggaagagatttgcctcctgtccaaaatcgacaaagtcaaatatgtccttgtagtcctccccgtctccgagatagcacagcctaggggccacgagccggtatttggctcccttctctgattgatggtggatgggaattgggattataggagcctggcaaatgcggtttatatcttgctgttttagatcagatattctgcccgccaggtatttaaacacaatccgtgcatccctctgcgtagtcgggggctgcttcgcgagaatttgaagacagtctgtcatgggaggatgagccttgactcccagtctggaggcatgggggtggaggttgttcctgagaattttgaaaccgaacaaggcagcaccttgatcggtaaagcacttcttcggagcgcttaagctatcagatccttcaatgggaaggaacggcactattaccgcactgatatcaaacgaaacataaccatttgtgtaatactcctcgaggaaatatgacagagccttgcttgctcgactatctttctctgtggccccggctgacatgagcatcactagttcaacagctgatgggcagctcttgagccccatcatcgtaaggaatttaccctcattgctgctgctggtataaatacccggccattcgataaccggtaagccgagagctcggagcgcatccttcggctcataaagctcggaaatcttgtaacgtgtgccttcgatgccactaccactttcggcagtacagatgctcgtctcctttagtctctgaatgtcgttcgcaggaatatcctctcgtacagaggcaaggtagcggatgagatcaacatgattccatttctttgacgcaggacctttcaaatcactagatatcggagtattgatcagacgctcaaagatcacaccaagctccacggttttgcgaactccaagttggaccaggattttctccttgacaccattcaggccatgaaccacaggcaggtcgtcaaaaagacgcacagaagcaaaatatgtttgtacgggctgcttcattccaagtttcgtggggatcacagtctggggttgaagtgtggcgacgatactttgctttgaagcttgactgagggtttcccactgctttgacaaaacaggcaatacctggcccgaaaaggttgctgactgcgtgatatcttgatctattgagaagatactgcgatttccgcaatttttgacgatccagctaagccaaggaacgatttgcagctcgccccagccaagtgcctccaggtcatgcttgttcaaagacttggtgaatctgaaaggtatcacgctgggcggtacgggcagttccgctggaatgcgctgagggttcaaaaaacaggtgatttccgcaaaaataatcaaacgagtgactccatctttgtcctcgtcattagccactgctacgcgtagtagactctggaccgaagagctatcaagctgaccagcgacggctttacggccaagccatgatatgaattcaaggacttggttaggtcgcaaagtattggactctaattcacgcttgatgtctgataccgtaacttctgtgaccaacccgaaatcggtcagccttttgacaaaatctttagcgccctgtaaaaactcctcaggcaaagcagaaattgagtccatgaagctgagatctttgggtgcgatgcgcgtttgatgactggggatgacaccacaggtagaaaggacctcaatagaggcattcttgttgcacatccagaatgcatcttcgattgtctgtcccaaaacagaagatggggtagattcacggaatgcaaattgatttgcagtatgaatagcctctggtagtacatccacaatgtcttctttccgaatcttagacgagcgtgatggtccaactctggatgcaagtttcgattttatggtagccatctctgcagaccaagcaattcgacaaacaataccgactgcccgcaacatctcgagattccatttgctgatgtaccgtgtgttcaaatctatgctctctcgctccacagtaggaatgacagatggagcagagacatgggcattcaaaccagtcgtctgcgctgtagggaacccaataaagactcttccaccctttgagggtaatattgatgaaagaatttctgactgcgatgaggacgctccagtcgccatgttggcgtcgtaagaaggagttagaattgcgagggttgccttcttaggtggaggcttccgtgtggcccgttccaattctttgctcagttctctactaatagatggttggagcgatgccgtgttgatatgcaagaagaccgatgctgagagcatgctattcatgttgcctgaatctttctggccctcaggttccggtttctgggcattggattgtttctcgggtgcactttgcgtgaatttagagaagaaactcttcagcgaacttgttgaatctcgaaagttatcaaggcggaacaagcttgcattgggattccattccacaattcgcatccacgaagcgtccacctgcgcgatttctcgagtgacattgacaattctcatcaaaccctctgcagttttagtgtcaatgtctctcggaatcgggacatcgacgctgggagccgtcttcttttttgatagccgcagaaggttccaatcatccaaccaaagttcaatctcttgtagtgagacaaacgtcaaactgctcgacaaaaattgacagagctgcagcaaagatggaaccggggaagaatcattgcgatagtccaatacaaaagtggtatcctgagttgcggcttcgccgaggtccagccggcgggtaaacaacgcattccccttccagtagaaggccatagcttggctaccagaagacacaaacggctcctcacaatcatcgaacacactataaaagcccactccgaatgcaccgatcttagtttcatctgggtttccgtctgcgatccgcttcaatcttgcccaatccttttcgctgaatggagcgccattatttgagatcagaagacgtcgaagagtgtggttggtgatagtatgttttagatgtgcggtgggatcatttgatgaaggtgatggtactgtggtcgatggaagggtctcaaacttgatcgttaccttcgttgcagaggcatcggcagcattttgaatcatttctcggaggaccgtcctgttcaatcagtaggttaatatttggatctcaagatagagaacatctgaatctcaccatttgccggagtatcgagccagcactttcgaaatcaatcctcttgtatcgactgtcacagcttcctcatcggcaccagaccccatagtccgcgccttcaacgcgttgaaatccacattcatagccatcttggtatgttttcttctatctgggtatattggggccttatatcttaatcagattagacatggaagttcatctacacctctgtatgaacaccgatgagtaacaagattgaggttgtctaggctgccgtgaatatggtgaacttggggccactgttcggataaagcgcgaccgaagccggggaaacaaaagttgacagaacgctgagcagaggttaaattccagtaaagacaaagaaaagataaaacaaataagattatttggtgagaggagggcagatcgttggagactgcggagtttacgtcgggtttatccttatcggtagaattgccactactctccgccctagtcccgagttatcatctccgtgtgtacacattcataggagaccccggacccgcttttcgtccagtctctcgcaatttcccctattacatgatatccgaaagctgcctagataattgtgtggatgtgggcttaatataattaactgctctcaactgacaggatgggtgttgaccctctgtccccaattgcgcctgtgcgcctcagggcgctcctcctccccatcggcaagatcaagcgctcgcgctttttgagtttcgctgcccgactacaggctgaaaatgtagttcgactaggggatattagtcccgatgcgcggccgaacagaagtatgccctacgcatgatcgcgaggagttggacattgctaccatatatactaacctgctcttgtcctagacatgttttcaccgctggcgtttcctaccggattgattctttatgacctttctttctctgtcccgccgacctcgcatctcgaactatttccctttgaactttacagagagccattggttattattgcgatcgcagatgggtccgaactgcccgagagcactggcgacgagcagaagcaccccactccggagggactagatcggttgttggaagagctcgatggggtgaaggagaggaacccacgggctttgttaaatcaactcgtggtttttgatcaccctggcttggacaagattacgaatggaccggataatgtcctttgggttcctccgccccagacctccaaggccacgacaatgaagacagttctatgcgatattacgtctgttctactctccgaaatggatgaatttgcaaaaaccattcaaagcataccgtcaatcgactcgcccaaagcatcgtcatggggcccgcaccggaacccagaactacggccacggccggtagaccgactattgaatcgtatgactctgcccacccagatatcatcgaatccgcacggcacacaagatggtactccgttgagatctaatgctagctccccagctcctagcgatcatgaaactcctacaacatttgatgagatcactcgggcaattcacctatccagtcgtacaaactcgggaagcagagcaccttcgacagcatccccgaaggagcacagccgtgaccgaatgtctgtcagtggtatgagtgctaccgacagaactaagaatcggatcaagggccgtgccggggtgattattggaactcttttcctgcaggcgggaaggtggcccgatgccctcaaggaactgactgaagcggcgaataacgctcgagcaagcagcgactacatctggcacgctaaagcgctcgagactatccttctttgcctgctgatgttcgggtgggcaggcatggactttcaggtatgtggatcactagcaatgccatcaaataccctgggtactcgtgtcagatcgctgatttgtttactagattccatcagttctgtaccctgttgcagacaaatcttccaaaccttcccgcgactcaacgacccctagtagcgctggaaatagggttatctccctacacaacctagccaatctcttgccagatctttcaaacaccatcttaaatctttatacccgcgcggccaatatcacagatgaacctcttccacagctggtgttctcggagacggtgattcgattagcgcgactgatggtgtcagcccgcgttcgcgatggagctttggatgacaatgctttgaagcacattgtaatgaatgaacacttggttccactactccagctagagcttcctcggggaactgtcttgctccgaaagtctgaaattgctaacttcttataccgggctttgccgcttgcccttggtgcagacctacctgcgactgacgctgttcccataattgttggtgttgttgctgttcttaattttcttgacctgcctagaaagaaagcattcattttgcgtgagcttctttcagtaatggtaccaagtttagtgcaagcacgaaaaattggtgcagcggaggtaggcattcatcccgccgccgggttggcgtctctgagcgacaccgcatttgatgtcaattccttagacgcaggccccggcaatatggagtcaagtgtgcgtctccttcttgcgacaattggagaaatctacggtgttcaaccttcatcgttctacgaatgggagaagagacaaagccaattatccagtgcgagtggtcttcaggaaagcaatgaatatgattcggttgctagtattgccgagcgggcattccgacatgtagttcttgatcgttacggtgatctgaacttgaagattgatgtcctaaaagcgtgcatcaactgctgcgaagcccttccggatttcactggagtcctgcgttttacagtcgagcttttgcagaccattcgaggagatatgatgctgggtgcagcatacagatccccgccgtatctaccgcaagacgaacaagtccgccttctgaataacattaagcgcaccgtgggcgcaggcaccagattaggtgtttctgatatggtagcagagtattgggatgacttcctggtgcgtgatgtcaagttattgtcactgccagatcccaaaagacctgttcggcggtccaaaacggagctggatgcggttaccacgagttcggacaaggcgaaaaaggatccgttcctgtacaaccccttcgccaagcctaccagcaaggcattggaaatgctcactgtcgctgatgaacctgcgccgttccaagtaactttgcaaaacccctatgaatttgaaatcgagattgaacatctgcgcttagagagcagtggtgtgccatttgatgcagtggcagaaaatttcgtcatcgcgcccctctctgtgcaagatatcactgttcttggcgtcgcccatggggaaggcagccttcagatcacgggatgtatcgtgaaagtgcgatactgtcgaacgcggagattccccatcttcaagacattctggaagcctgaacctgaggtcaagtttaagcgaacaggcctgggtgcgaagaagcctcttacagagcgcccggtttcctggagctcaacgacctccaaggatggcaagattgatgtcaaaaaaggtccggaaacatcaacatgtgaagtcaaggtcatcgccagacaaccgtcacttgtcatcgaatctatgtctctatcgcaatcggcgatgatggtccttgaaggtgaagtcaaaaccttcactattacacttcaaaatgcctcttcttgccctgtggattttgtcctgttcaccttccaggattcaactactagacagctacagactgcactgagtaatagagatctattgccggtcgagatctacgagctggaactcaaattagcaaccaagcccgctttacgatggcgtcggctgggccaggaccccagtgattgttcgattgcagcaggccagaaggcaacctttaccgtagacgttcttggaaaacctggtttgcaggagacaacagtccagatcgactactcctacgttggaacaggcccgggtgaattgcctgatatattctatacccggcaactgtttgtgccgttgacagtcacggtcaatgcgagtgtggaggttgcccgctgtgacattcttccatttagcggtgacttcgcctggaagaaccatattgaaccctccgtcgactgtatacaaaagtcggatgcgttgctctcgaccactgacaatgagcccttcgcgcaagtcctcggacgccttggaaaaggggcttacggacctgatcactgtattgtattgcttgacttgcgcaacgcctggccgagtcctctctcggtgtggttgcgcgtaagtgaacaaacaatggctgctctccaaccggaggcgacgaccacggatgatcctgagggcaagtactctgtcgacggagacctccaacctggacaggtttgtcgttttgttctggttttgcctcgcgtctacttagacaacccacatgcctccatccccgtcgtgaacaccggcacacggagacaattcgtcgtcagcgccaacaaattatcatttgaagctgaggcggcctcgcgcgaagccttctggttccgggaagagctcctcaagagagttcttggaggctggaaggaacctgccacaggccgcgaaggatccattgacctccgaaacgtccgactgaacaaccgtatggtcgaagccatgcgactcgaagatgtcgaaatgagattctctctgacctcgccatcatcttcacccgacacttccgccgcagtggaacaaacgggccgctcacgcttccacgtcaagacagacgacctcctcaccttaaatgtcaccgtccacaaccgctcctcccgccctattcaccccatcctccgtctccaacccagccttcgccaccagccaaacaacatcgccctcgatctaacccgtcgtctcgtgtggaccggaatgctgcagcaagcactccccgtcctaccatgtggagagtctaccaacgcctccatcggtgtcacggtcctctgccgcggcgaatatgagttcggcgcaagcgtcgaggaagcccgactcatacgtccatctttcgacgatgatggtgatatccctgctgaccgctacaacgacgatggtatcatggatacctttggtgcagatgtcgtgcggcgacgacggatttggcatgcaaaggagttgtgtattctcaatgcgagcgactgatgatctcggtgtttgactgttctggtctggtctcgtgtcatttgaacgtgagcatagacataatttcatcttgtctaactcctgtctttttcttcttttaacttaattcgatgatgaccatgtagcatacatacccttaacacccttctgtgcaaacttctgtctagatacctcaggcgttgtctgtttcccactgcaaatatatttgaaatctgtgagagcatgatatgctgttaaaaggatgtatgttcacagaatacgcctcaatctgatatgttcctacgaaaatacagggatttactaaaagataactacgatggtcatggatgttaggtgtcactgcggggttatctcgggcttttccccgcatttcctttaaatagatcgccgtgtccttcacttggatattcactttcaaattctccctcaatcatggcccaaactcacctccttactttaaactataaaggcgatcacaaaaagcctgataccatctatgacacccaaaacttcctcgataatgaattggttggctctaaaacaaccacatggatcgaggtccacgaccccgcaacaaacaatgtagtctcacgagtcccggaaacaacccttagcgagtgcaaagccgcagtgatctcagctcaaaatgcattccccgcctggcgagacactagtatcatgaaacgacaagaaatgatcttcaagttgaccaacctggtccgagagaacatggattccctagcaatatccatcgtcacagaacaaggcaagacctttgccgacgcaaaaggtgatgttctccgcggattacaagtctgtgaaaccgcctgcggaatcaccacacagcttcccggcgaggtcctcgaggtagccaaggatatggaaacccgttcctaccgtctccctcttggggttgtcgcatccatctgtccattcaacttccccgccatgatccctctttggagtctcccgattgccattgtgactggtaactgcctgattctgaagccaaccgaacgcgcaccaggtgcttccatgatcatcgctgagctctgcaagaaagcgggtttcccaccgggtgttgtaaatattatccacggatcgaaaccagcggttgactttatcttggacgccccggagatcaaggctatctccttcgtcgggtcgaacaaggttggcgaatatatttacgaccgtggcaccgcgaatgggaaacgcgtccaggcaaatctaggcgctaaaaatcacgcagctcttctgccggatagtaataagaagcatgctttgaacgccatcgctggagctgcatttggggcggctggtcagcgttgcatggcgctaagcgtcttgattacagttggtaaagctcgcgaatggctgcccgaattggttgagaacgccaaggggtaccaggctggaagtgggtttaacgcccgatctgatctgggtcctttgattacgccccagagccgggatcgctgtgtagacctcatctcgagtgcggagaaggaaggtgccactatcgcgttggacggtcgggaatacaaacccgagggttttcctaatggaaactgggtatggaaatcctgagtcccagtgtttacttcaactcctataaactatcctgctaacacgtcaacttgataggtcggtccgactattatcaccggggtgaaacccgaaatgagatgctatcgagaggagatcttcggccctgtcttgctttgcatcgaagctgacacaatcaacagcgcaattggcctcattaatagcaacgaatggggcaacggtgcagtcatcttcacccagtccggatctagcgcgacgcacttccagaagcgcgtcgagtccgggcaggttggaattaacgttccaatccccgtccctctccccatgttctccttcaccggtaacaagcgaagcgtggctggaacgggactgctcaacttctatggcaaggacggtctccgattctatacacagtggaagactgtcacgtcgctgtggagaactgaagatgcaactgagcttgagaagccaacctcaatgacttgatttggtcgtgacggataagctgcatacggtggattgggagatttttgataggcacagacatgtcgagcattttcttcctggaaatcattgcattaggtgcattcgtagtattaacaataatagtcggcgggttatacagcctctatccttaacgtaggattccaataacttttcaagcgacatatatgtaagatgaccatccgatgtcttttttagataacgagtcgacatcgacaagatactgactctgacttgagttgcaatttacgctggcatctatatctttttgttgttcaatgactgatcattctgttctgtaaccaaagacagaactctcccaattgcataatatattcccgtcaaggtggattaaaaggttggtctttgagaatgacccactcccccacagtgggcacgccggtatccactctcacgggccgatattcttccgatctcttgatagacccacgagtttagataacttagtgttaacacatcaggtgtcacttgataatttaatgccagaagtatcgactactaagcaatgaatcgagattataaaggggctatgttttgacataaatgagtttggatctcctatttgcaatttgggttggcatactggatccaagggaattagatgctaccaacaaagtagtaacaatgttacaatacactcaccgatctgttgagataacaggataaaatgcatagcaaattagacagaatcttgcacaagtaactttgctgcttggcaaaacagtctggactatgtgctggctcctattgaagaacagagtcagggttctttaagctcttggcaataaaagtcagcaaaggaatgcgcctagaagaccagggtaatactcaaggtacaaaagagcgttggaaggaaatttacacccttcactcagagtgcttgaagtacgagtcaatcttggcgggttcaattgagaaaacagttctggttccatctagagttgcaggcatgaatgtcgcgttttgcacaccctagagacaaatcgaggctgttggacatgcactcaatgatacccaattcccgcagctgtcgctcatcttgagagaagatggcataacttggcgttcgcttagatgccgataggttccgggcattcatatccgtggacaatgttcccatcgagaaaaatcacaaattgctttcatagcacaagataagttatgatacactatcacttctgactttttttgggggtaggacgcggagccacatgaaatctctattagaaggtgctatatgcggaaaaataaccaagggacaagaaatcacaaaattcctcgttcgaagtacgaggaccaaacttgaaatgagttgaatagcatgattttatcgccgagttgaaccagctaaataagtatcattgaaactggcatcttctatacagttatgcttctcaacgggctgcaggatgcgctaagaccgccacctgcatgtctatattctaccaaagaccttgtttccgtccatggagcactgtttcgctgctctcttcaacagcccggccgggctagctcaatcggtagagcgtaagactcttaatcttaaggctgcgggttcgacccccgcgttcggctattcctaaaaaccaaacctgagatttcttttttgctcttttcttttttttttcgcatgggaattggatgagtttttcaaggtccacttaggcctgccggctccggcggaaccttggctagcgtcttggcgtttgtattacctaagcagaaaccaaggtgacctccttgcacacttggcaatgctcttcgcagtaacaactggcaggcttcgaaactcatatatagcaagcagtttattctgttcgagtccaagcaaagacttcagctgctcacaagtatcagatctctatctgttggaaaagtttgatgcagaagaatggctcaccgttcaacaagacgtatatagctcattcgaagctctgcagtgggaagttaagtgaaaagcactggatcacgttaccgccgcactgacctctcaactggtcagctcatcggatacgagtttttctgaaacacaccgtactttaacatctacatatacccttgctgcatcatcactgtgatgtgttggccatatgtgagatctttaggcgcgtggcctaagggttgtttgttgaaatatagcctccgttcattctcatcctctacccgcatcctcgctctactgaaacctgaaaatctcgttcccatgaacgattcccaattttctattaggccgaagcctcagaatcccaccgcacaaaggttgggagaagttctttcagtatggcttcctaacaaacccgagggcctttacgatcaatatttgcaaagtctttctcctacttatgatcatttgttgacatatttacgatacgaccggatctggcgtttttctgaacatacccctcacagcctgtcctatcattctgagagtgctcttttgtcctctccggtgtttgtagtgaatatcggcgacggcgatcgagttatagatcatggtgactatgatgggacagaccctgaatccatgcgagacctagaattacacctttccaacacggatcctgattcaaaggatcaccctcgctgtcgaatcatctgcgcacaacatatcacgtgtttgggcatggaggcattgggtagtggactttctttggaccctaatgtcttcagtcaccatatcgggacatcattcaaggacattgaaaagagtacaggtatcaataagctctgcaacacaaatattggccatattccttcatctgtcggtacctacgagcacgagagaaaccttcaaatcgtcaaaaggcacctagggcgactttccattgccaatgtggagcatgcaaaagatctaactacccgggattcgattgtcaagtccatctaccttcatcaggaccatcccatcacattttctgtggatgtgccacgaacgatctatgtgcaaggatatcaatctgaggacgacagaacacaggctattggaagattcctacgtataagagtgttggcactacaggaccgagtgctgaatcgtcgcattgctcggcagcgatttgttgacgatagcatgttctgcgaccaaggtgaacgatattcacaaaacggccttgacatcctacagcacattaccatccatgtcataaacgacgcgaaatttcaacaaggtatggatgactctgtgtttacacatcaatgagatcgcacaattgaccaatttaccaattaactaattttgttagtcttggttttgtttccaccttgtccagaatttgatggagataattcagacaacgatccttatgtttttcttgaccatctgagaaagcaagaacataccaaatcattcaaggaattctgtctcaatcgggataaaaaggactatgaatccgcaggggcatcggaatctcgacagactatgtctcaagacgttgaaatattctccaatgatattcttgagaatcaagctggtacccccaaaggactaacggacgtggtccaccttatacgatcttacgctctgaatgcatggtttgatcgtctgcagacattgaaagaccagcttgaagatctcagtcttcaaagcctatcccatcgaagcatacaacatgacgaagatccacaggattcagaggaggaaaaccctacatgtgatggtctgattgatgaagaagggatgaaaggtgctattcttcgctacatcgcgtcactcgatgatgaatgccagcggttgaaaattgatttgcatgcggcgaaaataggattttccacaaccgggtccgactctgttcgaacattagaacagacaatggagaagtatactcacatacgatcccaaatgagcaaccttctctctgaaacccagcatttactcgacatgaagaacagcaggatacaacaggctttaacaactctcgaaatcaaagaaagcagaacgttcatcgaacaggcaaaaacagtgaagaggtatgatgttggccaatcttgagagaattaggactgacatatgctaggcttatcataatatccttcctttttataccgttgtcctacgtctgcttggcattaagcatgaaattttggtaaatggattgcccaaaggcattgctatgacattccccggcgtttactttgcgggctaaaggcaatgagatcatcataatgactccaaaatgtgttgagacgagacgccgggatccctgtttatcaggctagctagcctttatttgtttgtaggggatattctcctctttcctctcccctcttgtcaaaatggcatgaatgaatgcacgtacgtctgcgttatgggtctatgatgtaagggatataccccgtagtgtggggcctatggggcttcaaggttaaggctcggcaggacgggatcatcctttagttcaggtggggtcacgtgcttgtctttttctcatgtatgaagcccctgatttaatgcaagccttggcttatttatttcacgtcagtctcttcgtctatcctacgctttcctcttgaattctctccaccacagatcaacatgagtggctatccagttttgcagatgcctgctggggcaagattcatcgccgtgggggtcgcaggggccacaatcccacgggatgttctgaatcaaccttcaagaccatgcaacatatatcatacatcggatctatgtatcacccgcgaaaagcttatctaccagactctgccgagagagttaaaaaacagattttgaatggggtgtagtcagaattcattttctcccacatagagtcaaaaatggtctttcaactcctggaaactacgcataaattaattggataattcaatacttggctaaaattaaaaccgactatggtagtttaagctatctatttagatcgggaatctagatgtcctcgaacttcggcctaagctgagctatatatacattcagttcgtcatttacgcaaatatactgctgtcgctacatgactgtgcaaaggagtccgccggcgagggctaaagaatgttagtatcccaattttctggagtatgagatgagatggcttacctccagatatgatcccagacgccagacctgaggcaataccattggcggcgccattgaacaagttcccctttttttcactcagcttttgataggtattgcgggcctcactaacctcccctcgaacagcatcgacctcttgctcgtatccttctagttcaagtgctaccttccgggaattcttagcacgtcgagcggtgtccttgcggatttctgcaagtgactcctccatgtcgcgtagctcttgttccttagctgctagctcctcgaaaaatctttcttcgagtaccttgagtttctttttccaagctctttcttcatccttatgtaaatcccgcatcgacttctccagctttcgtttattatgctcagctttcctcatctgattttccaaatccaccttaagctcctgcatctcgatggcatgggccgtattcttctgggcaatttcggtctcgattgcctgtttgagctttttcaactcgagcttatgagcctggcgagctttgtacagatccccagcgatcacaatacctgctttcgtctcgccgatcactttcccctggtcaataatttcgcgctgcagttccaatacctccggaagatgtttttcagattgaagtataagatgtgtcacgatgcggcgtgcagaagtaatttcttctaacgagcccaggcgacccttctcattgtggcgaaacgttgtcgccccacgagaaataaatctaccaaagaaccgttcttccgacaggagctgtgcttcacgctgctcacaaagcggagatttttcggaccacatagttgtcgcgatggctagagtggaataagacgcgaatccacacatagccttcatcatgtcaagattgcgcatgctagaccctgacatgcggttgtcggatataggatgaagcattagtatgccgtgaatgcgcacgccgtttgcatacgatgcgccgaggtaagttgcgaggacgcttagtgtgtcaatgtctgaacggttcgtgtcgttgaatccgggggtatcaatgaggtagactttgtggccattgcagtcgaagttgaacacatcaatggaggtggtgcctggtggtagtattagccagtcatactgagtagaagccttggtgtgagtcatggaaagtagaaacgctcttacatgagtacagcccgtggccaacagtgacatcttcgcccgtgcatcgaccgatgaaagtgctttttcctgagcccgtcatacccatgacgaggaagaacctgtcgttggggctgggcttagtgacaccggtaaaggctgcgaagcgttcagtctgactaaccacagagcgcatgtccatgatggtttgaattttgcgattattgaccagccaaagtgatggttaacaggctgcggccaaaagagcgaaatgaagacaaggctatcggttgagcacaggaataattactggtctaacttcaaaatgcgtgttgagagcgataattctggagcattagcaggcactttttacgtgtcataaaaaccccccacttgactttacaagacgccaaatatgggggtcaattcaaaaaagcaaatatgcgaggcattttggccccaatatgcgctttgactggactcaaaaatgagcttgtaataagccgagaggcgtagcaaatggtgtacccagtggaaaatgaagtgattctacctgcacacctgggcatgggagtcagcccccgggatgaggctgacaaggtgagccacgcagcaggtgccgtgtttcggtgccttatacctgaaaggaatgcacttgcatcggcgagacacacatgcagcttagaatccaacgttggaggaatttgggctgacttgattggggcaaaggtttcttggcgacgacgcggtctcctgtggcctttgcccgggtgaacatggctgcataacgaagctgaggcggtaagatattatccaatgagagagttatgttctgctggcacacttagttgcccgtatagacattgaattgtgacggaagccatacagcgcattttaccatgagaacataacaaaaacaaaggttcctattctgaggtcttgggtgccgtattcctatttcgaggcttgatcctgttggtgcttttgggcatcaaacaccgacgggcttccactatttatatccgtcctagcccccttcattattatcccacaatattaactaaaagcctatcagattgcctctcatgtcagtcagatccagctttactagtatgtcttatacttcgcataactaggaaatggtactaaggctcacaaacacacaggacaatcaggaaatcgctcagtgcatggaaatgaatcacctctaagcactcgaagctttcgcggaggtcacgagcccaggtaagtggctgactatagtccaatgtgttgtggccaccatttaatgattaactagaccgaccgatgtattcattgctgtgatgggggtcactggctcggggaaaagttcattcatttcgctttgctcgggcaagtccgtccaaattggccatacacttgacgcatgtaggtgaatcgctatacgaactgagctatttccttggtccaagtctgacagaggaacaggtacctctaaagtcgacgtatacgcgtacagggaatcatcagatcgaactgtttatttgatcgacacgcccggctttgacgatacatccaagaatgacaccgagattctaagtgagattgcgatatggcttggcgactcatatagaagcaaaattctgctccacggaatcatatacctgcatcgtatcactgacgtacggatgcaaggctccgcgagacggaatatccagaccttcagaaacttgtgcggtgaggatgctctgaggaaagtaatcctcgtcacaaccatatgggataaggtccaaagcagcgagggcgacatgcgggaaaagcagttgaaagacacaaaggatttctggggttggatgctgagcaaaggcagcacctgtcatcgacatgataataccaagactacggcgagaagtatcgtacagcggctgacaaaacacaagagccccataatcacagatatacaaaaacaactagtcgatcagaatctccaacttgatcagacagctgccggaaaagggatacagagcgagactcttaaagagagagcaaaatggatgaaggaacaaaaaaagttcgaagaagagatccgagaggcaatgcgccaaaaggaccgcgagaaagaagagataatgcgcgaggagcgtgatatgagtgcggcaatgatcaggaaggctaaccaggacatggaagccatgcgcttcaacatggaagaacttatcgcccagcgagaggagcgcgaggcactcttggaagagcgcttagaaaagcggatggagaggcagatgcgaaagaagcaggctgctcatgacaaagagatcaaacggattcaaagagaaaaagaggccgagatgagaatatcaagagaacaggagaagcaagcccaacgtgatcgaaaaaaggtggaagagaaaaacaaggcgcagcagcagagaaaggcggaacaggagagaaaggcaaaggtcgctgaagccaatcgccagtcgcaaaactcttcatcgaaagttcaaggctggtctcctttttcggtaaccatgggagattacagttgcgctctcagtggaccaagatgttaccaggcgtacgttgacagtgcaagggagccaactgcagatacttactaatcgtctctaccaacagctctaggggtggctggccgaaattacaggttggctcggaatggattggtgccgtcagctatgggacttccggcacatggattgctcgttacggaggaggaacttggcgtaagcaattcctcaaatctgcgacaatttacctagctaagagatgtctcagagtactcacttgagcattacccaactctcgcaggcaaacttgcccatcacggagacagtaatcttgaattttgtgtcctcgggcctgggcaaatgtactatgcccagtgggcgaatgggttctggtgcagcgaagcaacagaacagatcaacaactatttaacggagatttacaatcgatcggatgattctaaagtgcttgccatggcatttggatacaatggcgcctatgtgatttcatttggatgggccactagatcgactatcaggggaaagtccggccatcaaagggatttgaaaggatattactcggatctagaacaattcgccgacgcaaatacttctttggatatagtggtgagtctctcgaattgccttgatcagatctcggaaatctcactttccaacaggccatcgcacttgacccggatagcacaacagattatatattagtctacaaatccggaaactatcggatacgctgggtttgctcggatccccggaggtcacaaatcattaggagttggtgggaccaagaatgcaagcctaaagaggctgtagcgcctacacagtcaacacataaggcttcagtgtcgagatctttcaaagaaatgctctcgaagatcgagaagtacctaattgatgggaataatggatgagaaaccgggaatatatatctatcatcagcttttgtggcagttcgaatattcggatttctttcgtgctattaccttctctgaggagacacgaatcaaagcaactcctgatgaattataaaagggaaagagacgggtagaatgtaatccggtccttagcaccagatttcaaagcagatgtaaccacagagccaccctgggctccggtggcaccgacaacagtaaggattttggacattttggatcaaagtagaaaagatgagtgtattgagatctaagagataaacagtagaagcaatgacatggaagatcgaatacggtccctctatatatattttgactactacacataagatcgcctatacatggacgaagtataccacggtacagtgatctgcatacacgctaaccccatggggtcgggactcagggctacaataaccccgaaacgccggattccgcatcttcaccaacctttctctcttatttttttctcagcaactcgtcatgtacaacataccctcatctgtctgcgttttctccgcataaacaagcattattaatgaactggcccaccgcacccggagctcgggttgtcgatcgatattgcttcagtgttccacttcacattgtgcttcaatttgccgtctcatcactcaataaatagtccccttatggggcttttagatagttgccttctgaatgttatggcggtccaaagatagacaggtgataccattggcagactagcaatgtacgtggcggtgaagtgtgtaaaacaatcgtcgtttgtcgccactttccacatggtctcgggagtcaaacgttggactcctgctaaaatcgaaccatcgtgtatgagtcttctatgggcgacggatcaaaccactacaacgtttatctagtatacgtccatcaattaaccttgagcctttcaaagagtagattacctctccctttaatggtagcaccatattagagatagagacgagagtacgtgaagaatgcgtgtagtaattattgggaacatacggagaggtcacgcgacctggaataatctactcggcataaaatattagtcttggcatccataaagcttaattattaatactgtattattcctccgtcttaccgccctaccttctcagcacggtagtctttttgaattctaccagtcctaccgatttgaacttctttcagataaaagagcagtaaattgcttcaaaaacatacctcgtattcattacgctcgcaaaaagccttgtgatcgaattcattatagagttcatctggctcaggaataggctcagccctcagaagctcttcaagctatgattgcggcatttccgattgataatgcgccatggtagctagtaaaaagattggaacgatagtttgtaatgtgtatatacacagatactatatatattagatgtagagttgtttatcagtaataaagtataagaatgtacccctcgtaaacatacatgctccataccaaaacgggatcaaagataccgtacgatttccaaagcaaacagtgtttacataagcccaaactaggggcactagcgtaagcattgaccatggtaccaggtacctacgtcccctgaccttatctgccgaactatgatcaaccgtcagccagccctccgggaaactaccccggacaaacccccttgtgaaggcagaatttggctctctctgcccaaatgacacgcgtaaccactattataggcgacggatcggaccactatatcagctcgccacacgcttttccgcagctgtaataaatatagcaacttacatttgatctaattactcacttttctacggtcgcattgagttcaaattatgaagatatgattgattgattgaattttcaaaatacaaatttcaaactcaataatggagcaagcatagagcaagcaggggaaaactttgaaaagcggtcttcttagaccgccttcccatcaaatatactgccgattccggtaaatcggtaggacgggcagaattctaaagccggtgaattcgggtatagggcggtaagacggaggaataactatggaaccttggaaccttccaaggttggaatatagaattgataactaagcggttttatgaacgccaagactaatatcttaatgaattgatggacgcatactccggactggtaaatgtgaatagagaagaagaggttgtaatattacatagcctgcccaagaccataattatacaggcggtgattaaagcggtgagccaaaaattggttttgttgttgtggttcgatccaccgatccatcgccctggtggatatgccaagacacgctaaacaacaatgtcagctagccttgcctctcagctgaaatgagtatgtatgtataactatgtctacttacccctgggcgcctttgatttctataaattgagtctcggcttccattacactggtggttgtcctctcaactacattgtgctgaaaaattgtatagcaccattcagcaaccatgaacttggccgtcctgatgtcccttgcgggattgggcgctagccttacagttgggctagaagcaaaaagcccatttattgccggtcggctctcacaaacgaagcaatttgagctgaatctgacctgggaatcatttgcgcccgatggggttgcgcgggagcaatttttgatcaatggccagttccccggccctccactgatcatggatgaaggagacgacgtcgaggtgaccgtgaataacttcagtcccttcaataccacaattcactatcacggcatcgagtgagtttttggaaactaaaaagatacccgcatgtccactaacatgttaatagacaggaaggaacgccgtggtcagatggtgtgcctggagtttcacagaggcagattttgcctggtcaacggtttatttccaaattcactgtccagcagtatggtgcatattggttagtcaataatcttcaataagaaatccaagccctctaacgaattgaaggtaccactcacatacttctgggcaaatcatggatggcctgtatggaccaatttacatcaggtttgtttgcatgatatcgagcgcgtcaatgccaatgactaatgtctaaatttatagacctcggaccattcctgcgaacttggccagtgcgataacaaatgatacatttgaacaggctcaaatacataacgccatccgggccccgtctctagttatgctctctgattggttccatatgacctcagaagaactccaagaggttgcaatgtctgcaaatattgatcccttgtgagtgattcaatgagagaagctacaagcaatgaaactgacatggcgatcaggtgtacggattctattctgatcaacgggaaagggcgggtcaattgccgcagtcccaaggaattgactgacatggtgcccgattcggtgaaatctgtgctacagggcatggagtatacggtgaaagggtatgttctgaattagaattcaatacttggagacgccagcgctaaatgggaaataaagttgccttccactcacaaacacctatgcccaaacgacatctggacataacttgagtgcagttccagcatccatgttttacgagtgccacgccactgaagcggcagaagaggtcatcgaagttgacccgttcaacggctgggcaagtctcaattttatcggctcagcgtctgtctcaactccaattggtgtgtactttgccagtctttataagctcccaggctaactagcaaagtgtctatcaataatcattccctttgggtttatgaggttgatggtttatacatcaagcctgttaaagttgatgtatgaacttttacctttttggaattacctttcacggaatacttctgactcaaacttctctaggcgttaacaatcaacaatggtggtcggtattcctgcttggtacaactgaacaaagcgccaggaaagtacccgatgacagtggcaaatgcagggttcaaccaaaagatcgcgggctttggtactctgtcctatacgcatacgcatggacgttcggttgtatcaacgccttcaatcaactacggtggaatcgccacaagcacggatgttgttacactagatgagaccgtgatcgaaatgtttactcctagccagcctagtgagcattcggataaaacctacatcctgactgctggccgcattgagaaggcttgggaatggtcccttaacgggaatcactcctacggccttactttggaggccgaaaagcccgttctatgggaccctcaatctgcggccaaaagccctttggccatcgccacaaagaacaatacttgggtggatataatcttcattttatctggcaacacatctacacttcagcctggtcacccacttcacaagcactccaaccgagcttatattctagtgagtgcttccaaatattgtactggctcttgctccaattcgctgacatttgacttcaagggttccggcaccggcgacttcaattacacttcagtcgccgacgctgtcaaggctattccagacagtttcaacctgatcaatccccccatgagaggttcgcagctctaattccacagggcctctgtacctgactgacatcattagacacttttactacgctgcctgcttatcaaggtaaaagctggatggcaattcgctatcatggtatgtgatttccccgactggatagaagatcattggctaactagcacggttgaattagttcaaaacccaggggtatggaaatctgaattctgtcgatacccggtcacgtcgctaacaattttaggcattcttgcttcactgtcacctcgacccacatctgacagggggtatggggtaagtttgcaatatgtgtacagctatggctatatttcgatgcaatgtgctaatttctttccttaggctcgcgattctagacggtatagatgcatggccgaccattccgtcccaatatggcccaaatgggaagtggggaagtattgacgcttgacaacttttatccgatttgtacaagagaaattttctctatttatctgttttaattggtctttttatttttcttattcgaatatatggtgtgctgtgtttcaatgtactttttccagatgttcgaagtggaagaggtgagtacatacattctactggagcatacctcccagccagatcctgcttaattggcttttacttattctgaaactattgtactaaaccatacactgcattataatagcattttattcaaggaaaccctataagtggtccagtatgtgttggaaaataattccagtacaatagtttattgtgcaccaatcagctttcctaatggtataaccgggccatttccttcaaactcctcatattatccgccccaaggccttaacttcatcatccaaatgcgtccataaaatatgcgcaaaactacccatcaacatcttcatatgacccagtcgtagctctgtctcgcccgtgcgacatgtattcacatagtcctcgaatttctccaatcccaggtgaatcatgcggtgctgcccgaccaagctcaattcctcgcgaaactcaggcattctcgaggctagctcagggaaaaagtgccgctcctcgatagtgtgatgcagcgtgagttgacgacagaaggataaagcgaggttgaggaatgcaggaatcgattggccattggggcgtttgttcttgacacaagcattgtatgtatcattccaaataatgcggaagttattatgctagaaaacatttagtaggctgtgggaaccgttgtggtagacggatagatgacaggaacctacaaatagatccatatggtctgccaatcgattctaggccttgaattccgacggagttaacttggagagctggattccagcagttgcttctttaactttcgccatgttatattcgatcgaagagcccgtgaacaaatgacgctgttgacagtgtattaaagatggcccaaccccttgaagcgcactctcttaaaatagtatgtagagtctgcgccatttattatcgaaaagtgtggattgatagaaataattgtcgaatcatgccgtaattattatgaatctgcatcacgaaggcaccaattgaccttactatattcgttcggagctcgaagctcgggtaggtgaggtctggaaggtcgctgactaaggtctccagagtccacccgtcccattctaacattcgatcagctgtaagcccggggtagggggatcgttcttcatggactcggagggtccactgatccgcagaatgacctttgttcacttctgcaacacgtgtctctgctccctgccgacagacgatggcgagattactatgatacacttgacaaatacatgagaacagcctggatcatcatcgagctctagtgctgctggattcactactgttccacagtccactgaggtctctggctgcagacctggatgcagaacgagctagtccgtacgagctctagtgaggagacgaaagtgcggactttgaaagacgggtactggttcttgaaccgtgggagcccttgcactgtggtggcaaaccgcacttcctgtccaaagagctggcagaagctgtctctagttcttaagatcatccctgttttcctgtcttgcctccttccatcatggacatatcttccatggtccagctagctctcttttctcttttctcttttctcaaccaaccctcaatatctaagccggaaatcaatatatacagaagaaatgcatctcatgcttgggagctatgtattaatacacaagaatccaaaatagccttgtcttggacaatttttgcgaaatgagtagtggagatattattttattcagccacctggccacagaaagagactcgccggtctcggtaccagccgcaagaacaacccgccatccataaaatacaatgctctgaaaacacaggctgtgagagacggtattaaaagcgagtaaagaaaacaggaacctctatgctatgtcgttgaaatatgatgaccaaaaccgaatactcgagaagagacccaatgtgaggatgtcgttatggagaaagagaagggaggatgagttgagggcgatcaaatgtagataagtcgatcgtgttggtgaatggagaggagggatggtttaaagcatagccttgtactcggatggaggagggggaggaagctgtttcggactggttagcaagcacatcttgaatctaggtccgaacgtatcagttcgaggacagggagtttatcatacctcgagctttgtattatcagccatcatacgctggaagccaataccgacaccctcgatcacagcaaggaagacggcacacataatagcggagtttcgggcagccttataaccaccacggatagcgagggagccaccggtgaagaaaccagcgatgatggcgttgtaaggatcttccttcttgcgaattcccttgattgaacaatcgtatatactgaaaagtcctccccaacagccgaagttaccacctaggacgggcgcgcgcgccttgatagccgtgagagcacctatccgacgttcaccgtaggggctgtttcggaaacccttaacaccgtgccatacggcaccaccgatagcacccatacagaaagcaccgccgaagtcgctcagggcaacccagggacagggatcgcgcgagtgatccataatgtgatgtgtgaacgaagcgagttgagagtcgggggtacaaaggcggatcggctgtatagatagtaattatgaaaggcgcgatggtaaaggtcgaaagttggtaacaagcccagtggaagaaagagacttgtgaagggcgtgaaggtagtaaaggtcgacaagcccaatagtgagagatgcgataacaagataagggcgggtcgaggacttttctttcccatgtcgggcacgtgaccatcatattctacccggtcgccaccgaacactacgacgtcggctgtgtttactcttactttcggattatcattcgctcgcatcaggcatccccgggttctctgcccgggaacgagaatataccggctattcatccctgcatgatgtctcgagaccatcagaaaatttcttcatttctatttgaatactctatggctcttttttcattgttctagggccaagggccaatcggagatcatacatcctaccaccttagaaccgggtattctatgatcgaaagaatgagcttctatagcctcacttcttcatctactaacaaaagaatgtctatcttgacctattccactcacaacctttccacgcttcgcgagtatgagcggtcattagcaaaatagtcggtcgatcacataggatttcgttcaaaatagatatatgcatcagcccatcccttgcaacttaaagtgatgtttgtcgatatctgattcataggtgggtgtctgatattgagttctagacttcttacgtctaagtaagacgttaaagtataactaacgaatattagagtcggtaattgatagatatatagaggagattgatcgtagttgcgaaacatcagattatattcatatttcagtcttttccaattttaaataaatagcaaattgagggagcaaacaacgggaaggccagatgcatggtcaaaagttggtatacctcgcccttctcgccgtcataggaggtgtataagcatatcattgtagctacaaattcagcttatgcattcaaaagcataggattgaaagaattatcgagtgtttggtaggattgaagtgtgacacccgtatgaaaagacgattgataaggcaaatgaaaatgccgagcaaggctcggccttttcggacgaggatcgaaaaatttcgcgaatagcccgagcaaatttacttataaataaagctagctgcaaagagatctgcggtagacatctaggtcctgttccttgttacttgtgctcaatcaactctcggaatgtctacttcacaactatcaaatgaccgggctacgcccagtagctccgaagcgcctgatcgcgtcgaacttgaaaagccaaccccaaaattcccagagggcggcctccgagcttggatggtggttttaggtgcattctgtgtgtctttctcgactttcggatacatgaacgctttcgggtaagctctatactccgcaactctatggtatgataacgaagtctaacatatgaacgacacagagtctatcaggattactacacagagcactttctctccaacgagacttcatccactatttcttggattggatctgttcaggtctgctttctcttcgctggtagccttatcggtgggccattgttcgaccggtacggcgctgtggtaaggacttgtcttcctatcagcaacagcatcattgactaactatactctccatattaggtcattcatatacctgcggtcgctatcgtattttcagtgatgatgacatctctgtgcaagaagtattatcaattcatgcttgctcaaggcgtcttgggtgggattgcttccggtatgctatttgcccccgtcatgacatgtgtgagccactatttccatactcgacgtgctgcagcccttggtgtgacagtctctgggtcttccatcgggggagttatatttcctattgccttgagcaagatgctgagaaacgaatccttggggttcggatggtccgtccgaattgtggggttcatcatcttgttcatggtattgatagcgatgataactgtaagagagcgacttcctcctcgtagcggcaaagttctcttgccgagagcttttgctcgcgctccttacaccctcgtcacactcggtatcttcttcatgatgtggggacttttcactccattcttctatcttccgcaatatgcccagtcttatggcatggaatcacagcttgcgtcctaccttttatccatcctcaatgctgcctccgttttcggcagaatattaccgggcatggttgcggataagattggtcgctacaatatcttgatcatcaccggtgtctgctcgggcattctacttctgtgctggatcgcgacaacttcaaatgcgtcaatcattgtctttgcggggctctatggtttcttttcgggcgggattgtgtcgctgatgtctccttgtattgctcaagtcacgccgagtccggaccagattggtactcatctcggcatgtcaatggccattattgcccttgctggtctgaccgggaccccgatatgcggtgcattgctagaaagatacggaggatacacacaggccgcagtttttagtggtgtcgtgatgtttttcggatctgtgcttgtcgccgcggcgaggttttgtctgcaggcaaagcccttggcaattgtgtgatccctcttcagcctcctcgggcagcttttgcttcaatctgtatactacattagatctgcttttttttactaccactgggtgcgaaaaccttgaaactatgatattatactcttcagaacgacatatttgagcaaggctaattatacatggaagaacccaaaatcagtactatcattcatgaaacctaaatcctccggaaactgttcagtcttgtcagtggatgcatcacaattgagatttcagaaaccaagtaaataccattgagttgagaagttcatcgtcaggaatcatagagctcggatcttctggtaagttaagcccacgtagacctccattatcactgcatacaatcaatacgggtttggatggggcttgtcaacggagtacttacgctgaacctagcagagagtgatctggctgaatgacagcccgccgcgtctgcagtattgtgcagattcggatcactctatctgctgcctctttgtcggatgttgcggctgactctggccacagcttggacttgactaatccaattatcatactgagtaagtaatattcgctcaatccgtgaaatgtcaaattgagcctcttttccaaaatctgtagtacatgctcaacagttgccacgagaaatgtggaaacttcgggaaatattgtcatggtagccgacccatttaaagctttcgattgattagttgcaatcgcaggatttagattagacaagcgcaattgtgctttttcttaccgtgaggcccaaagtttatgtatatttcatggcagatattcagtgcagcaagtagtaatccaatcctacaagcttgttcaggtactttctcatcatgtataagcttttggtaatgatcaagaatcttcgaggatgcctccaatctcgcacgtcggcagactgcagatttgaatgagggacgagtttggatcgcgaactggatgtgcagcaagagtgtatactggtacaggtgaatgctcaacaatctcttcacgtacatcgtggtctgctgttgtcgcggattgttctggggatttttccattctggaatatcgtggagtgcttcttctatctcctctccaaggtgcaagacccggtcaaaatcatcttgctcgcgacatccattgactaaggcacatattttcaatctgacaggcaaagagcggtacatatgtgcctggaaagacgtgtccgtgaatgtggcgaggggcataccttccagaggatcttggcccgacttttgtagctcgtcatcgttgatattcagcggtgattttatgttgaaatcttccattccgacgcttaggggcatcccccgttcaacagaggcctggatatcgagctcaacgatcgtcatccacaagcgccgacgcatctctcgatagtatggtgatattctcgctgtcgagggagattcacgatgatatcctgctgccatagcccaccggaccagtgccccggcgtatgtccagaatgaaccctcttggatatagtttgcacgcttcgcaatgagcaagagacaatgggtcgccaaggtgtcccaggattgaggaggctgattagtcgagttgagccatgattctgcagcctcaatccaatcaagtgcatggtcatgaacggtttgctgattcataacgtcaatgcatatttcgggatgaaagcttgaagcggctgctgccactaagaggaattgcaccaaaaaagaagcgggcgtgcaaagtggactggcccagtgacgattgtaatcagctatgaaagtcgatatattgagtactcggtgtatgatctcgaatctgtcgatatatgtctgtaccaatgtgtccgcaatcggttttatgggaatcaattgtctcagagtgtctctgtctccaggcacagtagtatcattggacaacggacgaagccgataatcatcattggccaaagggtaaatttcgtcacgaagggtgttgatcgccgggtttctggtcttgatttgaacgatgtagggtcggagctcggtaaactgtcactattgaggagatgcttcatatcagttagatagggtgtggcgtacctgttggtaaaagttcagaggatagctatacccatagaacttggtaatagcttcttgtccttttaagtgggtcattttctcatgccaatcggaagagggcctgggtctttccggggtctctgcaggtttacgcaaggccgttggcatggggccagtgctcaccggacggtcatcgctcaacatttcatttactgacgaagatgttgctggattgccacggtaggtgcagctggcggcatttcctgttttcgagcagcgactgcaggatggaagctcccttccacatttcagcttccgctgatagcactggatacaggccaatggggggcgtcgctttttggcccctggcttgaccacacgctgtgagctgattggcccacggctcatcgtttggcttgagatcgattctgacattattagtgcttgccatgagaaatcgccgagcgggagcttttatgccgggttatggtgacgtcggtgatttcggcgcggcaatttcgggctcggcaatttcgaccgtttccaccattggctcgcagtacattttgtccaatcagaggcctacaacaatgtaaatagtgcgtattatggatcattgcggtttattttggcatattttgacagatttattgctgctcattcgatgcgtaggcctcgggtataccagagtctaagtaataagggagctggaaactcgtatccggccgaaacatatataagacttgtgtctattcgagaaaaggctcaatcatctattttatcttcgagaactggactcttctgaagctcaccctttgacagcttccgttctctccttattcagaaccaacaactcgcccagagctcggggaatcctgacagggttaatacggtatcttcatacattctgtcgcgatgtcaacctcacgacaaaggagctttacattaccattaaagctctgaatcgatccggtcagatgagtaaccatgaacgcaatgagaagctcttaatctcggactgcttgggcgtggaagcgtatatcatagacatcatatatttacacacctattcataatctgataatttatccaagctaattgatgctcagacacaaaacatgttggagaaagacaacagcaccgactcttgcattcttggccctttctatacggccaatcccccacgctaggagaatggggacagtattatccagaagtacttagggggcgaagtgacattcttccacagtcgaattcttgatgccgataccagtttgcccgtggcaggtacgtctggctcaactcggatttacctttgacatctataatttgctaagtaaaacgccaggggcttctctgaacgtgtggcagtgcgcggtcaacgggttgtatgaccaacaagacccagatcagccgtcggggaacatgcgcggccttttcacatccgatgcaaacggccaatatgcattttactgcatcaagccggttccctatcccgttccctacgacggacccgcaggcgatattctcaaactgatggatcgccacccttaccgagcccacattcacttcctggtcacgagcgactcttacaatcgcttgatcacacaagtatttcccgatgatgacacttatctcgactccgactcggtatatgcagtcaagtcagatttgcttcttcaattcaagccttacacctcagactcaccgcgaagtaaggggggcaaagaagcgaatgtgcaatgggaagtcaattgggattttagaatcaagcagaaaaaggtgtgataggaatgaattatcgtattcctacgaatcagtcgtccgaccttagcggttgggttgtaccttatttgatatagcaaagaaagcacgttcgccgaaatcttgttcaaatctcttatatatccagtaacaaaaaatacattaaagtatcggcccaacaaaaagttgcttttcatctggagtacaggagtctgcaaccgccagtacagcgcgctatttcgagttttgcctgcaggataagcattcatacatctgaataaattcatataactcaattcaattcaaagaccatgtataaaacggtcctctgtacagttaatgctttttgccgcctttatatacatctgagaatagacttaaggccgcataattggccgaatatatgtttagagtattatgaggatgtgaaccctatgaattaagtatcttttatatgtcatataaaggatacttaggcaccatatattttctccctcgaagtagtacggagtacaaacacataccatgagtctagcttaattattgctaatgaatcacttttcctttcttatgcttaaaattaatcaccgaagtttgatccctgagtgcctgaccatcccaagcgttgtaaaaattcaatatgctgcctaagtattctttgtattggcaagtcatacaaaagatacctaattgatctatctgcggtttggtggagcacctgaccgggaccagcctttgatgacgtgacgtacgaaagacggaaagaggggcctgtcatttttttctatcgtctttctttctcaacggtgttagcacaacaagctcctcccgaattgcatgtccgaatgaaaccggaatcccccaaaacaacccttgaattattatgtgaaaatgttaaacaaagttaatattccacgtctaagacgcgaaaggcgtgcgagtgagggacgaggacgaactgcgcgggcctgcgacacatgccgccagcgcaaaatgaaatgtgatggcaaaaagcctgtatgcgcccagtgccatgctcagggtctaacgacatgcgattattctgaggcgaagctcgttagagagcggaagcagctagagttggctcaactgaaaattggagcctacgaggacttgcttcggaatatcgctcaaagagcggacacctctactgcgaaacaaattacaagcacccttgaagtacatttttgtcgcgtgtcattgcgtggtcacccactaatcagatccggtgaatgagtataggcctatacaacagggagcgaacaccggaattgttcttcaaatgtttcattttcgtctatcgattctctggacaatattgatacggtgggtgaagacctcaatcgcagcaaagaaagtagggctacaggatacatggggaaggattctgaaattgcgtggatgcaacggctggagtcgaatactacaagccagagcgacaacccggattctttagaaaaaccattgaaagaatggcctcctgttaatgactccatcgtcccagtgaactatcgtcttgaccatcatcatttgtccgaccccgaagtgaggaatgctttcgtcctaccaccgaaagcgctggcagatcatctactccaaatttatcgcactaacgtcgacatttctttcccaatcatccgatggggattattcatggatcagtatcgccgcctattctcagggagcttgataaatcccgggaggaggtggttggctgtctttaacatggtccttgctattggcaggaacttttgccgagtctccaaacaagatctgcaggtttacgccgatgacgacgtgttctttgctcgagcgaaatccctgaacatttcggagactgttctctttggctacgaagatctgcaacaagtgcaggtcgagacgcttatgacgttatacttcctaactgtttctcgggttaacaggtatgacccccaaaattgtgttagaagggaattctttcccgtgtgttgtatgttatgcatttctaacgaactcatatatcttggaaaatggtaggaatcgccgcgcgctcaggcatcgcattaggactcaatattcgaagaacgaacaacatatttgatgcggaagcaaccgaagcgcggaagcggctatggtggtcgatcttttacctggaacatctgctctctgccatgactggccgagcctcttgccttggagatggttcctgctctgcacctccaccgctaccctttgaacactcggaatatgagttttctgatgtcggtcagtggggtgatggccgattagctcatgccggcgatatgcaatggacgatcttccagagcgacgaacagatcgaagcccaacatacgtccttgaagtctatgcagcccagcgcgtctctctacttcttctatctggtagacctcgcttttatcacgcactccattaccaatcgggagcacagtacgagcatctttcgagatggttggattcagatcgaaagccgcattgagatttacactcaaaagctagatcaatgggtatctggcttacacgcttccttggcttttgaagacaagcatggtaatcaacaccccaggagcagatcatattatcaggtctcgttagcattgcactattacagcgctcgtgttgtcctcaatcggcattgtcttacacgcccagaaaccgctggaaagagcggcatcaatcttccacgatcccagttttacgacaaaacctcttcggcctttcttcgtgcatctttggcgctcatcgctgttctaccagatcaaccagatacggtttgggcctacaatgtcgccccatggtgggggttcctgcattttctaatgcaagccactatagcctgccttatacatttttcggttctctcagtgccagcgagtgtcgagactgaggaaggcgctcccgggtctgtggaaacgcctgaagttgttcttgctgcgacgaaaaaagcgctccactggctgtattgccttgggaaatctgatgaggccgctcgtcgagcttttctgctttgcaacaattgcattcgccgtatagcctctagcaaaggcctggatttgagtggtatgccctccacgattgatttatccgagacgtccagcgttgcccaatctacggagtcggatataccaagagagataagcaactcgaggttgcaacaagatcagggtagcgaatcaatggcctctcagggagttcttgacgatgaaggaaaggaagatacactgtttcaagagtccgaagagccacgaaaatctcgagacatcgtacggagcctttccgccgtgcttgacactgatatcgccatgtcagagtggatttcggacccgaccgacgcaaattttgaagagttattattagtgatgatcgggcccaacgtatagttgcgctctcccatggaatgtgggctataatgagtaacttgttcaactgggtaaatttggcatgttgttattcgcaccatacagatcacatgatacccatattagataaccaatctaatttattacataatcagtgtcgggcaccgcaaaataggtacgcatatgacgtcatatacgtggaagcacatgttaaattcaacaaaaggaccaaatttgttgggccgtatctgatttcaactcttataccatagatgtcgttctctacatcgctctgcttttctctaatgtcacctcatattatgtaggcacgtcatcaacaacatgattggaacatctactgccgagtacttgttcattcggctttgcatcctatttcttcacaacatcgcaccaatcagtattttatacagcgttcaattactcgtcgctcaattctttcatctaccaacttatttcgaacgcatacccttggctatccaaatttggctcattgcagaagccgtctttttcacatttgtctacataccacttacatacgcccttcgcaattctcctatctaccacaaacctttgtccacagagctcagagaacatctgtttcggagctgcaataagaatgtgcccaatgtggagaaatacctcagccaatggcttatggtctcagaagctgaatgcataaagcgcgataatgtgaaagactttatcagatggtcattattcggacctgaccatattctcgagcaagaccagcagcatgaagaggaaatcgagacctacacagtagaaattgagaagctgattggacgaaaattgtcaccgggcaggatggatgtgaaaggcctaggacggcttttgaatgaagcagggggttcacatcgaagtctgctatggtacagtgttagtactcgcttcctcctctctatgtgtggtatagccattttgaactgacattccaattaacttagtgcatttccgtggttgataccataacgtactgcaggatgttatacaatggattccacttctatcgcaattcgttctcgcgattctttaccgtctttccatttcgccctgtcacaatattcacgtcttaccgatcaccggtgcggcatctcacatactggcatcgacgacatacatccaagacacagctacccgtactattcatacatggtatcgggattggcatgtacccttacgcaggcttcctgcgagagttaaacgagcaactacaggcagacgccaccgacgatggtgagatcggcatcatcgcacttgaaatcatggcagtaagctctcggataaccaatcctgctctcgaaaaggaggtgatgatttctgagatcatggaaatcatgcggtatcacggatgggacaagatcgtgcttgtgtctcattcttatggttccgtaatcgctacacaccttctcaagtctgatcggttcgctccgctcatcgggcctgcggtcttcattgatccggtgtcattccttctccatctgcctgacgtggcatacaacttcatagcccgccaaccagcgcgggccaatgaatatcagctatggtatttcggaagtcaagacattggagttgcgcatacgttagcaaggagattctcttgggttgacaatattatttggaaggaggagctcggggtgaaggtggaaaaagatcaaaagggtagaaatgttacagttgttttgagtggtaaagatttgattgtggacaccgaaaccgtggggcagtacttgatgggttcatcagaggtctggacagttgacaaggaagcagcacaagcatggaaaatcaggccctggattgggtgcggacttgagacgctgtggtttgaagacttggatcatgctcaggtttttgattctgagactaccaggcggccggtcatcaaggcgatctctgtatactcaaagaccgactgacactgttctgttcgtgtgtcatgtcagtccatgattacgacattttcacgaagtttcttgtgatacaccggtttaagatgcgaatatgcccaatactacctcttagttcaagaacaatagataagtatacttgtccctgtcgtatatcaagggacctaactacaaattaggtagcgaaattgataaggtacaggattccatcatgttggtactcatgcgattgactaggggtttagataatgcaagtattcagacagacgttgctaatgtatccgaggtatatagcttatacttttcttttgctatgcggaattgagatgttgagtcgaatacacattatcattgaataaaaaacataaaaaacataaacaactggatactccaggtccttttttccaactcaagatcaccccaactcaacctttccctccgtcccagcaccccaagccaaaaacccactcgcattgaacgccctcctgctctccacaacactcttcaagtactcaaaatcccaacaccgtctcgcaaacccgccccccaaaaacccatgctccttatccactgccggctcaagcgtactatccgctgaacaggtaatagcctgggcaaggtaatcaaagcagtgcgctacatggacagagcggttccggccgaagtcgaagcgttgtagctcgggtgtggtggtgtaataggctcgccggaggaggtagaggcagtggagttggtggaaggcggaaggaattaccacagaagaggactttgacctcgaggtatctgcggttgaggggatgaagtagcccaggccgtctgcggattctgttattactatatcttatagtaggtgatgagatgaggtgattgaaagagaaataagaacctactgggtattaaagtatcccatgtcggctccgagacgttcccttcaagcggtggttcctttgagaagggggattgatacgtgaattcacctgctatttggcggaggggcaggtgaggtgctatagatatgttttctggagtcccggattcatagctgtgcgtcgttgttgcattggagatgtatatggtgaataatactccggttatgaatgccgtgataaaagagaagacgaagaatatgatgtgtgcgactgtaagttgtctgtttagtggttttctgagatgaggttgaggctcctcttctccgtctaagtcttccttcgcgtttgagaggggcttatactcttgtgcttttgcagtcaacatggttgtacgatgaactaggagcatgtaaaaaaaaggtgaattcacagcttgaggacgctaaagtcgaaggaaacattagtacctgaacgaacccctgtgcgcttatgacgcatacagcaatgcatggtcccctttagtaataaaatcaaaaagccgcatcattatggtatgtaaagttaagttacttgagccagaaactatacgtacaatcaaaaagtcgtgaatgtattctaaactgcccagagagactaagagactacgtacaacatatcaccaaaaggcatgaagctaaaagtaaaacgctatgtgggctaccgttgttgatatatcaagttctatctatcacattctctatgctttttcggatcaccgactcgtttgtgaatcagttacgttattcgatggtggcctgcatatctagcccagtttgaaataggatggtacagagtaatgctgtaagatatcgcgcgtaatacttgacccaatatcaaatacagtgttgatctacgtatctcttagcattctagtacttttgatcacctttgcaatgatataagagctgagggggtgtaagcatactttacataccttttgagtgtatgactactattttgctgctgacctgcaggtaagagaggggttggatgcacgtatcctgcaatgtcagctcgagcgaggacgcatgccaatgcatatgcacctgttagtctatttggaggtggcttgccggtaataccagtaccaataaccagcattaatcgattaccagcatatagaatattgtatgcgtttgtaagagatactatatttattacctgtggcttatgtatgaaagttgggttctcgcccgagttggcatggcagggtagacgccctagactggacgatcagcattcatccaggttggacttggaagtatgtggtactattcattcatagtaaacaaattgttatattaatagtatccctttcctcttgttgaataagcatctcacagcgccagctttccaacttccatcaacatcatctttgacatctctatcctccactttacaacaacaaaagagagctcagccactcataatgcatgtatacctcctcgtcattgccttcctaggcgccatggcattgggtgcacccgcacccactgagagtaagtatcacaagcagagacaccctactgttggactaggctgacacatgctatcaagccgctgcggttgtcagacccgtcaaggttgccaaagaggacaatagagatagcaagacagatagcaacgggaagaatgtgtttttcgcagatgggttctagagggggtttctctggaaaagccagaagttgtatcttcaaactatacttgggattcgcaagatgtcgttctcgatcgttagtttattatggggccaatcctagtcctaggtctacatacaagagatcttctctcttctctcaaacacaaccgtactacttctatacctccccagccagccctgtcgcaatcgactcttcaggtaacccgaccaagatctcctcctcgggtacatacccctcatcaaccacgtagccactcccctctggacaatgcataaaccttttcaacccagtctcatcctccggcttctcaggccgtctataacaagacgtatgagctttcgcccaattttccaactccccccagttccgacaaacccgattctgcccaactccactaacaacctcgacccttctctccgtagcccgaggtgtatcatccgcatcacatataatctgtcgcctcagcgcatcaagacaatgcgcgatatggtgccaggttctcgtctgtgtctggccttcccgaaactcgaaaaggctgatatagatgatcttaagacagtgcagattgtggaagccatggaggatgtagattcctttgctggtgtcccagggaaagcgctgcgctgtgcggaggttgtgggatgtagcgaaggagtctgggagggcaacaacgccgctgtcgatgtttatggagtgccatagggtatccgcaagggtggtatttggggaggagtaatcggttaggaggacgtagggctctgtgtgagtgaggtggaggtcggcgtattttgaatgagttctatagggttcggggtttgcggcgatgatggagatggtgattatattggtgataagagatagaagcagtataggaattaggaagaggaatcgctgcctgtaggggttcgagtttccagggccatctgcagagatgtttggatcctggctcgtcttgtcaatattgttgagaagaccggcgaattcttccctattctcagatggtgtcgtcctcatggtaggcagatagactcttccataattttttacttgaatcggagggtcataagactagagtcggattgacataatttctcacaccgaaattctgtagtccaaccaagtcaaacgatgtacacccctgcattcatcacgcccgcctgcagcggttactcgaaaatcttgccttaacatattccaaatcaaaccacctggattttcgcccctctaggagtcagacacttagctgcaagtcacctagtcgagtaagaatagcgagctactagtggtcatgcatgcatccctggtattcgtacgacctgcggctatcccttagctggccagtgatcgttttaattatcaactcggttgccttcactaaccagacttattcatctttaatattgagatgtattccgatattagcatctactatactatacaaaaattccagcccaagcgcattttgatgcaagacgtttagcgatggaataccaccgcgccctcctccacgtcaacgaccgcacagggttaatagttatgacatcgatatttttcctgacagggatattcgcggtatcactccgcttctactccagacgactctcaaaagtcccactaggacttgatgactggtttgctttgtcttctcttgtgggtccatctcgaaccccaaagacttacagcgacggtatactgatatagagatgagcagttcttcgtcctcgccttaaacggaatcttcctctcaggcgtaatacaaggtgcaataaccggtcactctatagttctcaataactggccccagcccagcgcgctcgaagtcctagtccagaaatacaaatatgctttccagacaacagagaagatcgcctttgggctgataaaaacttccattttactgctatggaagcggatgctaagtcccattcgctctttccagctgttgtgctgggttatgattgggattgttgctgcttggagtatatctttcttcttcgcgaccttgtttcaatgcggaacgcactgggactggaattgggcgccgatcgggttttttctaacagagtgtacggatacgctgaatatgctgactgttttttgtgggacggatgtcctgacggattttgtgatcatgttgatgcctgtgccgatcatttggaagttgaagatgtcggtcaagaagaagattggggtcacgagtgtgtttatggttggtatattgtatgttctttctcatctcatccagtagagagttagcgtgagattccagatgctaactttcgttctcacagcacgatcggcgcaggagttgcgaggacatatatctatctcgtgacatcctatgataaagaggataaccttgatttcattgccgacttcacgctgtttatcctgtggtcggaaatcgaggtcaatgtggctatgattgtttgctgcatgccagtctttggacctgttcttggtcaatgtcgtgacactctgtaccgccgttttggtcggtcaaaggatggcgagttcggtctccttgggccttcgacatcggaatcgacaaatgacggcaagacacgcctcgccagtttcagcgcttcgaacagatcctatccacattatgagtagggttgctgcgaagcaaaactcgatgtctctggtggataatgttcgaacataaagttatgctagcgttatactagctaaagccaggaggattcaatattaaagggagatctacgtccggaataatactgtatctcctattactatgttgtacatagtccatgggtctttttggattttagtttaatgattattatgcacgtttttgttaatttcctgactaaagagtaagaccggctgaaatagaagaagcaggcaaccaactatgtagcttcgaacccttccggctgatcggcagaatatcacagtagctatccgacaacaaaccgcttcaggtatatgctctgtaggaaagaagggaatgtataattgactcagtctggtgcagctccgtagcaaataaagcaagcgaagtggcaataaaaaaaagtaaacatcatccttaccagatagcccccaacggcacctcaccgactctttaaatttccttctcacattcttcctcatccatcatcaggcttttaaggggctcagacctcgcataatcgaaaaaatcatttcagcagtcatggctaaccgcttgtttgcatccgtggtagccgttattctggcaatcagcgcaatctactaccaggaacttttggatacgatttatccaagtgacaaaataaaagtggtggacaccacgcgagatatcacttaccttggcagtctatcccctgctggaattgaacatttccaaaacattttctatgcagaggaacccacgggactgcgacgtttcgcagcgccggttccaacgagaccagtgaaagggtctatcatcgacgccacccaggctggtgcctggtgtccacaaggaacgggagatatactcccgttcacgagtagtgtgaccaacatcagcgaaaattgtctgagcttgagaattgcgagaccggcaggaacgcagaaagatgctaagtttccagttgcgctttggattcatggaggtgagtttactgtttgtgaagacatgagcgctgaagacactaatgagtagacaggtggccatgctttaggctcagcttccgatatcctttacgagcctgatggcttggtaaagctggctgctgctgatgggctcccgctggtatatgttggcataaattatcgcctgggctgtaagttatatatcaagagtctttgaaactctgtgccgaggcttacttccggtttagtatttggcttcgcaactagtcgagcattgattgagaggaaagacacaaatgcagggcttcgggatcagcgcgctgctttggagtgtatgtatctcggtgctctttgatcgcgaaatgatcacgaatgctgagaaaccgaacaatcaggggtccgcaataacatcgagtcattcggcggtgaccctaatagaggtatactcacttctatttcccgggttcaagcaccaatatactaatagattttcttctagtgaccgtcattggacaaagcgtcggggctagtgacatcggtctgcagctaacggcctttggaggtgatcaagatgttccatttcagcaagcagtgtaagtgagtcgagccttgaaactgtttcaatgctgattcgcggccttagaatgatgtctggaggtccgggactgaacttcaacagccaaccagacctagttgcaagcaacacggctgctgttgcacagcaagtaggatgtgctagtgacaacgatttgcagacactcgaatgtcttcgaggggttccctttgaacaactaaccaacctatcggttactgcatctcgggcagcccgtccgcctttcggtgaagcttatttttacccaacgatcgacaatgacttcattcaagatagaccctcgcagttgatacgtgcaggaaagttcaccaagggaatacccctgatagcttcctgggtcacaaatgatggcgcttggtatgcgccgccgacaactgcgacggacgacgaagtcctagggagttttggactatggctgcacaaactttcaacatccacgaaagagaaactcctacagctgtatcctctagaggacttcaagcacatgatcaagtcagagcatgaaggtcaaatttcaccgcagtactatcgcgctgcacagctgaaccgcgacatctggttcacttgccctgtccttgactttacatggcagtacgtcaaaaatgggggtgtggcagcctcccaagtgcggctgtacgaattcaacgaaaccagatacgcgccagtctttgattccatgggtgtgtcaatgtggggtgtcgctcatctcagcgatatcccttacctattctacaatgacgacctacgggccggtgcagataactcggacccacagcttgcgttggctcgggattttagccggaagattattcggtttgtgcatggcagttctaaagaggcggacgatgaacttcagtcctggccgcctgctttctcggatgacttttcaaaaggttcattaagcgatatgcctagtcatatctcattgcagctgtttggtggccctcatggatcagtgcctactacatgtagcgaagacattggggctgatattgaggcccttaccgacgcagagaaagcgcttcattgggaaaagttgttcagtcgctgtgcatttctcaatgggcagcaatttagagaggaagccggggtgtgatgaaaacatgttatttggggtgcagactgccaacttactcgcgcagcccccgctacttagggagaatatttaggagtcattttgatttgaagctatcaaaatcacgtcgaattccttccatggtgcttgatgaacacacgattaaataccatgccctggtcggtcataaagaagccaccaagggtaccgtcccgtatatacccactcaaggtccacagccccgacaattgtaaggtctttctcgctttttatcagctcttctatgccagcgagcggataggctcagaataaacagtcgttggcgttggcagacctccaattcggtcaaaactgatctcagaatcaccgctaacctgccatattcgtacaggagatggaccacgacgcggattctgcatatcttcaaaatcttgcattaaagatattataccgtccgagttaatcactctttcaatttatcgtagactgctttctcattccaaaattattcctcccaattattcttttgctgcttgacaatgagtgatgtgacggtctagggaattgagtgtcgatatgagcccgggtcaagtgtgaagcgataaactgtacggcgttcatctcaaagctgcacattggttgcataaattggatgattattcaagtagattatctgaggcgatgagcttaatcaagacttctcttaaagtatgtttacctattactggctgtcgacacttttctctcttgagtcttcgaaggggtatttgctaggtggatagttaaggaaatctatatatggtgtagtgggggaccttgtcttccactacgtattgaccttgcctgtcctctctttattaagtggcttcattacgtaaccctggagtgatggaggatatatgtagaagatagagacagattgaatgtacacacctctacacctctctgagttgacttcttgggcagcgggcctgggttcctttgtatgcacagtcgggtatgaaactgaactgcgagtgctgaatcgacctgtatgccttagagtatacagccttgagcgttcccctctttaatggctaaacaaaataataaaagtatcttcctcgaccaggctgcgattaatgagaggaactagatggtcgtaagtgtcgtccgttgcccgtacactcgttgcacttaaatacattatgcattgaaggaaaggctcttatggatctatgaacccaagttatctatttaaaatgatagtaatgtttccttcgactggtttatccctatattccccttgaatctctccaagagcagatagttcccgttgcagtttttccggaagccatattttcgatagttgaacagactggatttacaaatgcgcgttcaaaaccctttggatatccgcatatgtgacccaacagcgtcgaagttcaaaatgacggagaacaggaaggtggatgttcgacaggaaatcaatcaaaacgggactgtcatctagacacagtgtttcgatatttcgtagtgcctctgccattctgtctcggagactacgatgacagacccttatctgagcgtagaacacagatatctggaaacatctaatcacaataccgttctctttggccacaaccatagcgtcgatgattgtttcgaggtgtgtcagaaatgagtagtccaatcatcaaagactcgaggtgcgaaccagagaaatgtgacccaaggggacttagcaggcagcatacattgctcctgtccagtctacagtcccctacgcacccaggatgggtgctctacgcaccatgacaggtaccatacttcaggcatcagcggggtcgtgacagttaataaaggtgtggtattcctaggttttattcctatagaaaggtttaacgtttgtaggctctcgcggtatataaatataatatttttctattacttatagtgacgggaaaatggtggtaaggcgaatgtatatgtggcagaaaaatctcaataaaatctctaactctctaaaatgacaaatgtccaggaaaaatgacaatcttgtgaacaacttagtaatcaaagacaaacaaaacaaaatgaaaggatgttttcggccgaaaaccgtggacttggtttttcggcggaaaaaacaaatgcgcctgtcacgtgatccatccgtaacaaggatgaaacattacagtatccagcacagattccgacagagaggaatctattgtcctcttgctatgcttcatgatattgttgcatatgcaaggttttagacgaccaaagcccccatttctgcgagtcttctagggtctggcccttcccccggttggtacgtagtagaggacccaacaccgtcttggttgaaactcaagccgctggtccccggaagttgggtagttgcaaggcctgccggattgcacatctccatccgcagctgcatgatccatcgtttgagtgatatattcgctctcccagcatcgaaatagaaatctatcaaggatgactgacccctggtaggatcggaacagatctctggccagttgatcgaacgccgcgcatttgaatccggctgtgcatccggctgcccgcgttctatatataggtcatcttgcaaaatgatctctcttccacggtaaccaagactagacaattggacaaactgcagcttggggctatctgccaacaattcgaagcttcgcttccagagttcctggatcttattgataacttcgagagatagcgaagaaccccaactactcctctcttctgtgagggggcctggatcttgtgctccgattatcgcatctgtcaagctgacattcttcatactcagtcgccttaaggttggcgctgctgtctgaagaaagcgcttgagattccccactgtcagctcaatggaatgaagatgaagttcttctagctgggaaaaccggatattctgggagagatcctgaaaatagagaggagacaattcttccaagggactccattgagcgaaggtcagaacctttaatttgggtgcgactgtgaccagtatactaagaagatgtttgaaggcgtcttcatcgaatgtatcgttttcgttatctttaatgcgaatgcacatatgtagagtcgtaagatcggtcaagagcgatagcagtgattgatactgtgactctgacagttttatagaccccaacttcatgccacatgcgatattgccgcacgtatggagggcgcggaccttgtggctagatttgattatagccttgaccatttgtgaaaatgctaaggccagaggcatagataacatcttccgctggaaacttgtaaatgttaaatgaacacttatatcatcgttgttgaactggttcttcagttcacgtaagccaaggcagcgaaatgaacgatagtttgcttccaggagaaattcaatggggtaacaccgtaagccgactgtggtggcgttttcgaggcgcggtaggcatttttcaagaaccgcagtaagttccgagtcgagaatagcacgatgttcttctagtgcagcttgataagaggtgaatagagcgtcaagctcagccttagcctcagttttattgaatggtggttcttccttttcaccgcgcattattctgaagatgcttctctgttgccggagcgccaatcccggacttctgaaacgttccttattcttttctggccacccctcgaacaagtttgggatgatccgaatttctcgaaccgagcctcgtaaggtttcactttctgcaatatcctccagattgtcaaggctttcacgggtgagaagaagtgataaaattttgaagtagcgcgttgcataggctagcttagttgttaaagttatagactaggtactcggcttaccgagaacggtagtctgtaggtaactttgtgttcaaccgaagacacaatatatagagctgctatcgaatcaaattgtaaggcaaattatagttttattacaataacccagccattgttaccaaggaatacagttgaagtagcgcgttgcataagcttccagtgtactgccatgtatttggtggcaagtgattctgagcgcaccccactcctgaggctccagatattcacaaatatgagacaatatctctggaggcaggattgtgatagacattttgtatgaatagtcacgtgaatggttagggatggggttggaaagtggaagagataattagaggaggtggcggcgtttgcagatttgaaggtagcgggagggtagcggcgggtaggtagaaggtagcagccctaatcttaggccccgtggtagacttctattcatatatttttggaaatgaagctaaacgagacatgagagcacttaatgtatctatctgacgctattactatctaggggcagagatcacccgacccaatggtaacgatgagatataagccatcttaccatcccacccacggctagtctattgttctgagctatctatagccctctatcgcacttaggctgatacatacgaccatagggtgtggaaaacagggcttcccgtccgctcagccgtacttannnnnnnnnnnnnnnnnnnnnnnnnnnnnnnnnnnnnnnnnnnnnnnnnnnnnnnnnnnnnnnnnnnnnnnnnnnnnnnnnnnnnnnnnnnnnnnnnnnnnnnnnnnnnnnnnnnnnnnnnnnnnnnnnnnnnnnnnnnnnnnnnnnnnnnnnnnnnnnnnnnnnnnnnnnnnnnnnnnnnnnnnnnnnnnnnnnnnnnnnnnnnnnnnnnnnnnnnnnnnnnnnnnnnnnnnnnnnnnnnnnnnnnnnnnnnnnnnnnnnnnnnnnnnnnnnnnnnnnnnnnnnnnnnnnnnnnnnnnnnnnnnnnnnnnnnnnnnnnnnnnnnnnnnnnnnnnnnnnnnnnnnnnnnnnnnnnnnnnnnnnnnnnnnnnnnnnnnnnnnnnnnnnnnnnnnnnnnnnnnnnnnnnnnnnnnnnnnnnnnnnnnnnnnnnnnnnnnnnnnnnnnnnnnnnnnnnnnnnnnnnnnnnnnnnnnnnnnnnnnnnnnnnnnnnnnnnnnnnnnnnnnnnnnnnnnnnnnnnnnnnnnnnnnnnnnnnnnnnnnnnnnnnnnnnnnnnnnnnnnnnnnnnnnnnnnnnnnnnnnnnnnnnnnnnnnnnnnnnnnnnnnnnnnnnnnnnnnnnnnnnnnnnnnnnnnnnnnnncgccggtgagttagtagttgggtgggtgaccaccagcgaatcctcactgttgtatgttttttatttttatttttaatattcgttcggaagccaaacgctttgcttcaccggctcttcacgccgatcaaatcaacacaaggcgctctggactatcctagacaatgcgtgtgacggaaggtcatcattgttcttgcgagctggtcatcattgtcacgattggcacttgcggaactcgttccttcccgtccgagagaacacgtttgcacaagcagtcgtaccttccttccagaataagcgaggatagggatttgcccccaaaggagtataaagaccccattgttgcttcacgtttgttttgttttctttttcttcttcatacttgatattcagttagaaatgcacttcttctattagaaagagcctggcacataacaatcatcaactgtccactagcccttttttgatgccactccagagaaatgtactttcccctggacaaacccaataatctattgagaattaggatataaaagaaaagctcgccatatttgggcgaatagaattgaatactcacaaggcaaccgaggctccagatatcaaccttcttatcctaatgggtaccgattgtgaattctggtgctcgtaaagctggagattgaatcgtatccgatgggtgattgtctgaacaagaagctaaaaccattgtaattatcgcccacaaagatgataagactagttatatatacaattaccgaagtcaactattctgatatgcggctcacgtatctccgagatgagcggcgtcctgatgacctcccggagtggccttgtaatactatacttattattgacccgtataggaacttcagatagatatttctcaatagtttgttccggattttctagctcgagtagtatattcgtaggtgtgatgtgccaggtctgaaagagtgcattgaatacagaataactaagatagagagaggaaggaagcaagttgtaaagtgggagacagctagttcttatagctgtgtcctgaccgttttgccaacaatgcaaacttcctatctagcaaacaatctagctaagaaaactagtaaataagcaatgtaaacgtcgaatacaaagcaaatatgctgtccattcggcccttcatgtttgaaatgatccagaaggggtaatacgtagtgccgacctccatggttgcttttcccagagatatcggatgatttctcgaggatttatcgctcaaaaatgtcgtgcgagctaccgtggcaatccgctattagtattttgagagccacatacctctgaacccttcagtacttggtaagctgtatatttaataaatatggaaaaccatactcacttggattccctagctaaccaaacggtagaatattgtccgtagcctagtttcctcaccactttgtatgtgccagagttgaaagtatctccaagcgaaacgggatggaagcctccagtagaatgaaagtctgcctcttctgttgtttgtttcactggatggagagatcttgatattggagaaacatattcaaaaacttttgcgagccaagcttgagaaattactcaagccaaagctttattgaatgcagtaatcatcttgagatgttatttgcaggtcttgtgtttttggaacctttggaacgctcgtcggacaaattatgaatgatcaaggtcaggaggtctagaaattaggtatgattttctagttcttattgtgccgcaccggccgtattagactgcagtgatacagatatttgcgaattaattggttgaattacgattctcactagcactagcggccaaattttcactacacattgtatttgagggccatagataagaattagttttgtcgtagtggtccgatccctcgcctataacggatcctcccataaatacatcgaatggtcatgcctcgttaagcttgatttttaaaatgttattatggtccacaacggggtctgtgttattgttacaccgaacaaaaatagagaaaaacatacaacagtgaggattcgctggtggtcacccacccaactactaactcaccggcgnnnnnnnnnnnnnnnnnnnnnnnnnnnnnnnnnnnnnnnnnnnnnnnnnnnnnnnnnnnnnnnnnnnnnnnnnnnnnnnnnnnnnnnnnnnnnnnnnnnnnnnnnnnnnnnnnnnnnnnnnnnnnnnnnnnnnnnnnnnnnnnnnnnnnnnnnnnnnnnnnnnnnnnnnnnnnnnnnnnnnnnnnnnnnnnnnnnnnnnnnnnnnnnnnnnnnnnnnnnnnnnnnnnnnnnnnnnnnnnnnnnnnnnnnnnnnnnnnnnnnnnnnnnnnnnnnnnnnnnnnnnnnnnnnnnnnnnnnnnnnnnnnnnnnnnnnnnnnnnnnnnnnnnnnnnnnnnnnnnnnnnnnnnnnnnnnnnnnnnnnnnnnnnnnnnnnnnnnnnnnnnnnnnnnnnnnnnnnnnnnnnnnnnnnnnnnnnnnaagtacggctgagcggacgggaagccctgttttccacaccctatggtcgtatgtatttgttacagcattagagggaatcatatagcaagataattggggttaaaagactgactgcaagaataacagaattggggtgaacaacggcagaatatcattggatcgtgttgtttcccttgaaacgctctgcatcttggcatctacacataactagaactggaatcattatacggagtacacgataggcagtactccttacaagctttttgaaacatattcgaaaatcccatccggcttgggaacagcggacttgacattctggatctctgtccccagacagacaagcacatcaaagagcttctgtggctccaattcgctcctagtgtgttctgccaccaggccgatgaacctcttaagctcatctccaaatcctttctgctctaggccaactacgacatatcgaagctcaggtacatttgccatggatgcggcgtaccactggattatcgctttaacctgtctatttccgccaaaagcgccgcagccctagagtctagtggtgacaaaggagtagggcttccggacattcctgtaacaatgcgaggagaacgaggtgtaggccttcaccaattcccgatatagacaggctagtatcaggtccggaatgctcactccactatgtgcatgaccgctgtctacaaggttcaattccagggcgtccatgaatagcatgacccggtttcgccagtcagcagacgagggtattgctgatttctgctaggcagtattgaccaatagtaattaagtcacccatggcggctggaggcctccataaggcataaaggtggctttgcatgagtctgcagtaatgttgtacaagcacaagatgtctaggacttcgagttggacagggaagaggggaggctggaagtaaatgctagtccgcatatagacaaccgtgtttcaggtcgtcagtgatttcgaatatggctctatcttgttcgtggagataattttcatcaatgtacgcctctctacgacagtatgatttaaatctgtttatgtagtgactgcccaaagagctcttggggtttcgccctatagctgtcttattgtaaaagggactaagttgtgaaaggacctggtataataatcttcctatatgtccaaactggtatataaattgtatattgcgagcatagcgttcttccctataactcactagaagatgccctatccttctcacgcttcccgggtcgattagctgacagtattgactgtgcataacgagggactttagtataccacattctatagtcgtatgtattcaatctagcactagagagaattatagaataaattaaattcaaactcaatatgtttaggtaatatccaaacctcgaatcaattatcgccagaatattggcacccactggtcataatctccttcttttccaaattccaccgcctgcgagtccttccttaatagatagagctccgcctcgtctcgcaatttcctcgcctcgtcgttatcatacgaatcctgaagcagtgcttcggacagcttgaaaagcccccgcgcatgctcaacaggcattatgtcggcatggaacttggtaatctcgagagattcacgcagatgtttgctgcagtgaaaatcaattagactggtcccgaggggaaatacgatagctcagtgtatagatagtccggggacaaattttagaagatgaaggggaaatggggagaggagataaaaagaaggaacgttcacctacacagctgcctccactttcccctgatcaagacataccacccccgttttgtataagcatccggcgttgaaaggatgcaattttgtctggtcccctttaagccacagattatgtgcctcgataaaatttgcttctgccgcctcgaagctatttcttcgacgctcaagcagtcccaagacaaagtatgcgctgtggggacgggtcagcaacgaacatctcttgtaaacacccttgtgtaggcaagcagagacctactaagccagcattgcccagttaagcggtagttcctgcttgaactcggtgattgaaatgtcaagcaattcttgcgccttgtcatattgaccaagatacatcaaacacctggccatattcttcttcgtcaccgtcggccaacaaattcccctcccctccttgacattccaggcaatccatgtatccttcgacttttcaaaccatatcaaggccatctcatgattattggccgtgttataattgtaagccaggttctgctcaaatccgccgagaagtccgcctttcaacggaatttcatgcaatcgcatttcgtaacccttggtgttgagctcaattgcattttgcacctttcccgtgctctcgtacatgctggcttgaagggatagcgtccaagcggcgatatcagtggccttttctttatcctcaagtgcttccacagccagcatattcacttcacacacgtcttcaagatccttgagtgcgttgatctcgtagagatatctggactggtcactatgtgactttcaaatcaatgcaaaatatcagacacgcttacctctgacaatccttaagaagctcacaaaatagcgatgataccctgaaattcttcgagactcgccgctcttccttgaacttatccacaagactgagaacgtgttgaaggcaacgattgcacccagtccactctagatatagttggttctgattagctccatcggactgcttgggaaacgcacgatacacgatcgcggttgcgttggcgaaagctttctgtcgctcatcaagagagaggaaatatctaaattgagtctgcaccatccgatggcaagaaaatacacgagcatctctgtcacgtttgatcaaagcaagggtaaggaggggctctgttgcctccgagaaactgcgctccaattaggttgagggtgcttccaagatagggctcctcatacctgaactcgtcggtacaaaactcaagatcttctggcagatcgctatcttcagcaagatcaaagagcagctgtggaattttctcagataccaagaatgacgcaattcctaagaatacccggctatccttccccagagtggcaaatgagagatcccacacagcctgtagctcagattggtgagcccgttttgggttcttcaaatagatttgcatgaattcagcaatagaccacgatcggcgatgaatcaatccggccatgtgcgagatggccaatgcatgaccactcagtttctgggaaagttcaattgccgaatcaccctccacttggatgtcactacctatattgcgtttcaacaggaatagcagaaactcggagcccattttcgcgtcccatgaggttatttccagaccagaagtggcaggctcgtatgccaaagaatggttgcgggtggtgataattgcctttccatgactggcctccggccagtatggcatcaatagatcggcagactcgacattgtcgtagaccactagccatctacagtctttctcatgtaatcaataagcaccaatagaaaacccttatagatgctctcgaggagtgacttaccagtcgtctggaaccaattctggacaaggatcaaattctcgttgtgcaagttgggttgcgcccccggtaacttcaagcgcattgcaatatctgtgaagctctgtcgtaaagaggctgtcttctcgccatagacccaaaacacagcttcgtattcgttcctctcaatcttttgctcaatatatcgtgctgcaatcgagctcttgccaatcccacctagaccaaagatagcaatggattggaaagatgtgtttgatcccacccgacctaagacctgatcgattttctcaaaagtctcgactctgtcgaaaaatcggggcgtctttctgcttggcagtatcatgcaacgaaattgctgcgcaagtgttgctgggtccggggagctgtggtgatctggacctgggagacgtgccgcaatcaacttttcgactcgcgcaacagtttcaatgagctcctggtttgtagaggtaaatcggcgctgaagcagcagccatgggtcattttgtcggtcacgactatcctcgtctcgtctatctgcgttatcggtattagtttgcctgtacagtagctctttcctttttgctacaactcaccatgacgcattacctcttcctcgccacgcatagacttcaccgcgctagtgaaaaattccactagctgaatctgaatatcaaagcatgcttcttttatttgttccggattgtccctcagcgcgacatagtagcctgtgaaggcctctgctttatatccaagagacttcaacatccgtggaattttggagagcgcttgcggatcttgagtagtaagctatcgcgttgtgagcggaattgaccgttgaagaatcaagcctaacggctaaatgctcacctggagtaggacgccgatgatgccccaaaagaaatcagcttggagaattggggccaactgagtctcgaatatttgtgtaaacttatagaggtggccaagcgttggtttgatcaaagcaatctcatatggaaccactacgccagcgcctgtgtctgccgatccccacacatatttctgcatcgaatcccaggaggtgatcgattttacctgcctcaagtcatctggctccagtgatttctcgcactgctcgatggttgctttccattgacggccgaagaagctttctctagcgtgaaatggtcagctaccaaacattggtatgctctccggttcgtgttggcaacctacaggtccgaggagtccatcgcgatgtggaggcagtagaaaagcggccgtaaagtggcaggatagtgtagcagaaagtaaatttcaagtgcgaggctcgttacttggtatgaaatggaaggaagggttctcgcagctagctgcatctgtaacagggcgtaacaaacattctgtgtgtatttccaaagccctttgtggaacagtgcatatgtggcgtttgttccagctaccaattaaaatcaaggtcaacgagaacgaaacataggctccaacagcaattatatcagttcttcgcaaaattgttagaacttccgaggatatcaatacaagaaatgaagctcttggaattagggctttgaagggtacgtagcaagccgatgattgaagtatcacgagcgttgggcgatttactctgagacatcaacggggcctggcccccgcagatccaaattatgcgggttttatcccgctttacgaagatcactctggcgatcacatagcatcttcagcaaatcaacaacactcattttgtagccattggcagtttacatgtacggtattggtattaaccccgaggcaccccgcgtcgaataaatagccatccatgctttcctggctgaatccgcccgggtttcttttatgtagtcttcctgtgaccacgcaccgctacttattctttgttttctcatccactatactatgctcacgacttgtcgcttataccatatagccatggtcaaaccagtgaaggttcaatacatcggatgggaggatgactttcgctacgccgaagagaaatctcggatcacagagcatattcaaaagattgcagaagataacggattttcccatgccttggtacagtgagtacatcctgaggtttacctgcgcaaacgaagcggatagctaatggaccttgggcaacatagagacatgatcatgagataccgctacagatcccaaggaccatggatagatgtgcatttcaagcgtgagcaatgggtcacaaacggagtagggaaatacgtgtttacaagattatggtttaatgaggatggggacctcgacaaggatccggagttcttcgaggtagaaaattgatatctggaataacctgagctactcggagactttcaatggatatataactggcctgcaatgtttcgtaaacataattaccggttagtagttacccagcgcactaggatttttcaataatgcgggtcaaagtacactggctggcggtcgactcccaaagtggaaaactggcgtaagccagtacccctcaccagctgcttcccaacctctagctaaccatccgacagattatgaagatacgtttttatcacttcaaaccgtcaagttaatgtgttggcctttttcacacaactcctatggcttcacgaatctacgcgccttccccttcgacattcgccgaggatccggatcgatatcgcgagaatggacttcatcctctcaccattggtgatatcctcaaattcggtagataccgaatagttcataagctgggctcaggaagctttgccaccgtctggctcggcagggacacatcagagaacaaatatgtctctctgaagatcttgtctgccgacacccctcttgactgtaaagagcttcggattttacaggagataactgaatctgaattaaaccacaaaggacgagagtttgttgttcagcttctcgaccattttaccatcgagggccccaacggccggcatctgtgcgttgtgacccctgtagccggagaccgtttggcgagaaagcccgggttgccttacaactccttggagtggcctcgaatcattggacttcagattgcagaagccttgggttatcttcacgtcttgggcattgcgcatggaggtcagtcttaatcgcattcaggtgcccgtggacaatgtttaacttcgaaacagattgttacacatccaatattctctcccaggttctcccatttgacgattggaccgaagaagagctctatgcttgcctaggacagcccgttaaacatcaagtacgtcgcttggatgggatgccaagggaagacaatgcccccgagtacacagtcgacccctgtgatataacagcactagaagctcgtctgtccacagaccgaattctcctcatcgacttcggagctgctttctatcaccacgaaagccctgagcagatcttcactccagctccattcgcatcccccgagattcttttcggcggcgagctcacgttcgcagtcgataattgggcatttgggtgccttctgtacgagctttgtgccgaccgcagtcttattaaattacttttcggatggaacaacgatgcgatgaaggaccaggtggctatgcttgggaagcctcctgatgctctctggcaaaactgggagggtaaggacaagtactttcaccccgatggaacaccaaaagaagcccacgataggcgtctgaaggtctacccactctccctgaagcaaagagtgcgaaacctggagaagcccctcagcgaacgaggctacggaacgggagacgaagcgccacttccaccagatctccagaacttgtttgaccttctcaatggtgtcataacttacgacgccaggtcccgcatgtcattcgaaggagtacaggctcatcctttcttcagaggcgttaatatcccggggtgttgacgatagtttatcgtcccagaagataagtgcacatttggttttgcatagccttttggagccatggtagcgatgagatattgagatggccggatcctggcaattgtgttttggtcatttttcctatcttctgtttctttgtctcggatttatctcgattctctaagaacatgagcatagctgtgtatgattgaatagcccgccactactgaattcactcatggtagaagcaaatccgtctttttcaacatataattttcatcggtacgaaccaagtcgttgacatcgactcaatacgttttctgacaacccactaaccagtcaccaggtgtaagtcagacacgatcattcgactggagctaacggaagaggacggaaataacactatattttgacagcctagctccccttgaggggaaattgattggagaatacgtctaaaatagcccgaagtgagattataacactgcaagcaacgcatgcctgaaaccgtggacacacgcgccaccaccaccaaccttggcgtgcaggaacataatattatgcgcaaatggtattcgggatacgccattgaagaggcatgttaacacgtaaagattcaaaaacggaccgacgctcgactaagaatataccgaaccccgctagaactgtccggggtcgaaacccgcgactttggcatacccaactggtgatttgcgcattggaaaggttgtacgggccacctagactcggcgcgtgcagataacaataacttggcgcataaattaaatgaatggtggaattgtaatatccgactttatctgctgatactcagctcaacgtttaccgaaaccccaaagcggctgcgtgcgttgagctgagtagtttgttacgcgtattcgatgcaccttccgacgagtaatatcgagcgattcatcccgtgattaacttgcagctagaatgggagctgtaggtctcagttgtggtacaatttcaaaaattggttattttttggtcatgtacctttcgcatacggatgtgatctgaaaagatacaagttctttacggttgggagcaggtaatgtatagcataaacaagtatcaatcttcattaaaataactctcaataatacctctcgcagtcgccatcatagaactgccgaggactacccttcgtaactcctgttgatctgatgcccccgattttgaaagtctgtttctcgtcttgacgagataaatgagctcccactatcgagtaacataaagcataaatcacttcctagtaagggtttgttagctgcgtacctttgcttgctattcgtaatactcacttgacagaccgcgagggcttaggcttctccttcgaaaagtcaacatcggctctaggatcgagcgcaatggttccgtgttgactcatgccgtacttggcgggattcatgccggcgtcaacatcatctttcatggtaatagcttctcccttaggagttgagcccatcaaggccgtataccactcccgccaaggctggacgaggtctgagttgatattttccgcgggcatgttgctggtctgtgattgggatttttctttgaagtgggaaaatttaggagttgagcttggaggttcggcaatgaattgggatatgtggtactatataactgttttatcggcaatgggaaattttgggctcgcagctttcaagagaccgcgacccctcttctagtctacgcaatgacgggtattccagtagttctcactaacaagcagtggaacacggtggtcaagtggttatcttgctcaacgtggaggaataccatttgacaaagatccctgtaggggcttacagggatggaagcagctacgtggaccttcggattgggctggtcctttgaaagagatgcacatgcaatcggttacagtctagtattgcctatacggcagttggtattatctgtagaaaatcccttatatacctcacgcacttccaccaagcaataagacccgcccattaactttgcacacagattataccatcaattagttatgccaatatggaaactacgatctcctatttagctcaagaccccattctcgacatcgaaaagccgttcgataccgacgtcccggttgatcacatccccggcgcacgcgcctcgaaccatcgtaacgatgagagagatgtgaaggtgtatccaatcactgatcttagcgaatgggacctcgagaaacatggtttctgcttcatcagagcaaaaacgggactgaatgctgaggatgcattgacaagaaagagggaggtacagaaaggttactggtatgagattgaagcgatcttgcacgaggctttcccacagtactcgagaattgagtgctatgattgcacggtattgtgttattctcagttctacactttgaattgtatctcacgcaatctgatgagatataggttagaaagagggacccggatttccctaccaatatcaggatctataccaaagtcgagcagccagcacgaagaccgcacagtgattgttcgcccaggggcgcgcacatgaatcttgagcgtgcgttcccaggacaggaaagcttttgggagggcaaggacttcgatattttgaagtaaaatgacccctgtcaagctacttacttgatatggactaaagtattcttcctagcgtttggcgaccactccgaggcccaaataatgactggcctctggcgatgtgtgactggacgactatcgacccttcaattgacgttcgcatcaacgatgccatcagacgtgatcgggttgatgagaatgccattctgcatttcaatgagaaccataaatggtatttcatgaaggatcagtcggtggaggacttgattgtctttcgtaacgctgattcctttgggaagcgtgctcgtaagcttgattcttacctatctggggagacatgtgatgaaatttatactgacgtctctgaagaaggattccactgttcggttttgaatccggagacgaatgggcagctcagggagagcgttgaagtcaggtgtgtagcatttcgctagggttgtggtgtacacggagtgttttcgtagcatagtatagcttcatgatgcaatcaattccagctgacttatcgcacaaagcgtcgagatgattcttcgtatgaaatgggaatcaaccaacaccattacctgattagtctgattgatttggctagtgaactgatccaaaaaaaaatgtaacgtgtactgttgcggcttagagtgagtccccatctggattctgcgggtgttgtatatttgcccgtaattgcccgtaattgcccgtaaggttcagaatacaaattttgacagaatcatttagttacaaggcataagcccttttaaaccttctgcaaattgggcttgggctatgcaattccctctttcagccgtcgactccagcactaagatgtttgaaagcggtacagagccaatcacccataccgaggcgagataagaattaattaccttcttggttaaggcttgcgttaccgattcaacgcctagagtcatttgactttttcggggtttcaaattgcatgggtgatggctcgttctgcagtccctgcatgcccggttgccagctcacgccccctcctgcctgaaaattcagtaccgccttctaaattgggtgcgacattggattttaccatcatttctgccactatagagtttcctgccaatattctgcccacgtctggtttacatagtaaaaaacattcattttgatcagaaaaaaaacgaacggagttatattctgcctgattcctatgatctaacccctgactatgaagcagtcattaatgaagcagtagttgataaagcatttgttgatgacgcagttggcgatgaagcagttgatgtgatagaagtgacataattttgttagttgtttacatactactccgtacaaactgcaggtatcgacggagtatgtactccgtactgtctcgctactcaaggttgtgtagggagtttgacactaaagcggtgtagatagcggtaagtaggagcaggtgtcaaagtatgatctattcctaaatagaaaggcggtattgaactttcagacccgtctaatattagtatctagtttctcgcgcatggtgccctagaatgcactaaaatccggtcacggcgttactggcattggattggatcttccgcagttttgcaatccgaggatcaacttgaactagccttggctataccgcagcagtttatgttggagctgaataatatgtctgcactattgcagcagcaagctggaaaacactcaaaagaattgaaatgccacccacccataacacagcccaaaatgtgtaccactgcaatggatttctccgatcccgccacaaatctctaattctactcggttgctgcttcagattgtacagctgcaccgccaagagacgagggccgaaatgcgggaagtcgtcccgggcggagtaggtatctgactcgatgagagaattatagagatcgatgttggaggtgggaaatagctcgactgggatcctagacttcgtgaagcggcggaggaagcgggactgcgtgaccgaggcgctgcagatggcgagaaggaatgggtcaatttccccggaaagtttcttggtttgctcgagtagttctaatgcaatttggcgggagtgtgaggactggccgaatagaagacggtatgagagtaacacttcacggtggagagaagatgcgtcgttggctaagctgtctgtataaaaattggatggaagaagctcagacgaaaccctggcagaaggttagacaattcgtgcaaatacatttttgagggcatgaaaagagctcactgatagagaacattgagttgctgtgtctgtaaaatgctgctcgcgcaaaatgttggcaaacagaacacggaaagtgtccgggattgtcgatcaaaagcaagatgagatgccagattctcaacccatttcaccctcacccgacctatcgtatatagagagtaacagttgacacttgattcgtaaagtatatctgtcgctgtagccccatcgtgtctagtatcttccaacgtacccttaatggcacggaataactttttgattggccttctggcagattgcccgaggggaatctcaccagattcccctggcctgctgccatactttgcgcgtaggaatagagtacgatcatttcccgatgcttcattggcctgaccaagttccaggtctgggtctatcgtcatagatgcccagcatagtactgcaaatattgcaagaagagtgtggtccttctcaagaggactgaatccggccgaatttcctttgatcaaatgatggtaaatcttctccatgctcacagtttcatctgcctgcaggctctggattccccggagcactgcaaggaaccagtgccagccatgaacagcattggatggtttctctcgcttgaggattttccagataatttcgaactcttcgcacagcaggctttcaaacttcctctccaaatggttgcataaaatatgtattcctggccattgttttgcatgtgagattccaagcccaaagagcaactctattgcttcgagatggatatccagggacatgtcttcggtggttgtagctacatgagccttgtattagtttgattttgattccttctagaacactaatctctcttacctggtttaggtttcatcgaaagcatagaaaatgatggctaggagaactgtatttagttgatgggaaccgacagaacacatcacaaatacagatacggcaaagctcacatgtatgatacctgcagggcgccgccatattgccgacaaaaaatctgaaatgtctctttttgcggggggttgtcgaccatcgtgagcttcgagatccgggtcagaaaccatgccgacgagagattggatatgtatggaacttctgacttcgacttcgacattggcccctgagacgcatttcaaaggaggtcaactcaaccctatgaccaagagaaagaagacgagtctgagtaagcaaagcaataccccccaagcgttgctaaccggattgagcgaggatacgatgtggttgtctcggacttcttcacccagttgcgtttgttatgcatgacgtggagtgatagcgcttaaaaaataagattacagtagagctgaactcttcttatttctcaatagctttttcgctccacagaaagaagtgaaaagctaagttgccactcgttatgcctccagcaggcaaaaattgctgctcttttatttcgacgtaggaaagacggccatcagcctgggaaggttccattgctgtatcgaccagatcttcatgtttcgaaagactcacgggtttatttatcggcggtttaggcgggttcatcactttcaaagtatccgagaagaggtaatgggcgggtatgcatggcttgtctcttgacttgtaaccacataaacttcatagaaaaacacgatacggtattttccatgcaaaagagaggggcggtaatgagctccgattggccacgtactagcgtggcgcgaggcgatcacacctgaagtcccacatcgggttcgattggaccaagggcttgataccctgctgcatccagtcagcgctagtcctgtgaccagcggccttcgaatttatgtttcaagtagtacataattgaaaaactagtggcattaaaatggcgtttttccaccttcccactgccgtcggagtcggccctccggaaccgcgaattgggttttttgacaggtttctcttgggagattcggtgacgatagtgtcagcttctcggttttattttaggcataatcaatgattgagaataaagaaagaaattgctcggtagaaaattctaccaatgtgtcctatagcatgtatgtgttctgtaatttcagtcaaagaatgtgagggcctgttgggtagcgcagccccaatccccaatccctgccaactacgctgactgagctcccctccccatcgcttttacggcgctacgtcttttggagcacgaatcagtctacccctcctccacattgaacatcgctccacgatagctaccttgcctttttccaagccttgaggtgaactgttttaactccccctgaacctcttatcattcataacctccctcaccgctgcatcaagtaccatgtccgttccccaaagctcctttaccccgcctcctggcacaccaatccatcagctagccataaagccgattttcgatgctcttgagccgcgggagaagttctatgctcactattgtgcaagggcagcatggcatgggagcagaattatcatgcggcaggtatcgccagaaagccctggcatcttcgacttcatcatggacctctatcatgcttgcgatggaaaatgggacaccttagtcacccaaagcaatatcacatccgaagagctcgaaagatttctggagtatgccgcaatgtttctctgcaacttaggaaactactatgtaagttcggcgagatctttctagcaacagcactgactgtgtaatcagggcgaaggagaccaaaagttcgtcccaaatctgacagccgaagcactgcaaaggatcgcaagcatctcccaaaagacgaaggaaggtctagacaaaatcatcggtccgctattggcagtcccgccattcaaccttggatatcccagcaagagcgcacagtcaggttattacactggcactgaactcatgtcacagaaggagattgctcgagtgtcggaggcaatgattgaacattccattgggccagagaatacccgagttcgaaagctaattcaggatggaaaacctatatatcatttgcttcaagcttccgcggagactggtgttcccgccaatggtctacacgaactggcaaatgacatattcatcgttagaggcgatcactcggtggaaatgtcgaacatctgctcggatctggcgagagcaaaagaatacgtcagcaacagcaggcaaacccggttcttggagctctacatcgaatcctttagtactggtagcctcgaagcttaccaggagtcacaaaaggcgtgggtaatggatgtgtctgcaagagtagagaatatgattggtttcatcgagagttatcgtgatccggctgggatcaggtcggagtgggaagctatgatcggaatttccgatccgggcgaaacattgaaattgaaacgctttgttgagagttcaacttctatcattcgacaactcccatgggcagtcgatggtgtcaacgatgggaaaggcccgtttgagaagagtctgtttgaagctcctgactttaccagcgtccacggtgagataaagattgtctcctcggcaagttaaaccatatactaattcccttagcgcttgctgtatgcggcagtgtcgtcttcgaagccgccaatcttcccaatgtaagctctggaaggggatttctggattgaatgaagctgacaatggagttagtacgaatatattcgagaaaattatggttttaagaatattgttctcgcaaatcgtctcagtgctaacaataaccccaatctaccagtgccttgggtcgatccatcagagttagagcacttccgcaagagcacacatattgtcagatttctcaccaccgctatccatgaactggtgggccatggaactggtatactcctcagcgaaaccgctccgggcatctacaactttgaccagcagaacccgccgatcagtccactgaacgggaaagccgtgacttcgcactatttacctggccaaacttggaatagcgtttttgaaaatttggcaggaacagtggaggaatgtcgtgccattctagtctcggaatatctcatggacaacaaggatttgttgtgtattttcgggtacaccaataccagtgaaatcacggctgacgaccgtaagtgctaccacgaccgtgaatttagcttgcttactaacccaattttagtcctttataccacctatctcaacattggtgtcgatgggcttcaggctctcgaacattataactttgaaaatcaggcttgggggcaagtccaccaccaggtatgtattcctaccttttcatgctctagacttattaaaactaagctgctacctaggctcacttctccatcctgaaacaccttctccaagatggcggcggcgttatccaaatctcccatgaccccaataactccactctcaccgtccatatcgaccgggacaaaatcatctctcacggcaaaccctctttaggccgctacctctgtcgtctacatatatggcggtgtactgccgatatttcctcttgtaaggaattctatgagcccatgtgtgctgttgaggggatatacgaacagtggcgacagattgtgtgctcgaagccaaggccaagatggaaattcactcaacccaatacgtttgttgatggagaaaccgtggaggttaaactgtatgaggagaataacaagggaatcattcaatcatgggctgagagagggatttgaaggcatcaagattggagtgcatggcaaatagggtgtctttcctcaaattcctgaaatggatattctgccttccccgcttttaatatttccggcccgccccgtcgtgccttccgcgtatcagtcccactcaacgatacttttctaaaattaggtaccttttgtgtggtagtatacccatacaaaaggtacttataccccatattatgttctcaaccctctggctagttaaaggagaaataagggtttaaatcaacaacaaatcatagttaaattaattggctaataaaagaaatttcaaatatcttatatagagaagtaaagaccatatttatgaaagagatatatgtagagacatcaacgttctaccacttggagaatactcaatatttcttcctaatatgttaatagtaaataaaatggacctcctttagactatatattccctactatattttttgtaagtattcccagaagtgacaaaatctctgtttcatgttcatgtaccttttgtatgggtataccatataaaagacacctaaaaagaaaaatctcgtttcgtgagaatctctcgttatgtgggacagacccatacctggtacagttatgggggtggtaagacggctaatatccatctcttgtacttggtatctggaaggagatgcactacgtattacacatgtgttccctctttgcttgttgtaatacattttgatggatatattcttcgttcttcctagctacatgattatctccgcggtcaattctccattttgattaaccatgggaaatcatacccaaatgacattccctgaatcaaacccattggcctcattgctccatggaagtatataacttcgctggttactcacaaccctaatccccctctccttaaactccgttgagtaatgtgtatgcccgaagacccagtttttcacaccattccacggctgcgataataagtctgtggcaaatgcagcactccaaggattcttcgcatgctgtggactcgatgtacggtgcatagcgggtgcatgatgtgttgcgaccagaatcgaccgtttcgataattccgtaggatttgttttgtggttattataaatcgattggacctcattgcgtagccaattcaagtcggactcatgcgccgcattatgctcgtcgaccgtccaatccttgattttctggaaatcctggattttgtaatggacaatatctctggagttttcgggaatattagaccaaaaagtaaatcccagtacggtgacatgggagtctgggatgtcatatcgtcgttggtggagtaaaatgagtcgtccatttaaagatggctcttgttcaagtcgcctcactgtttcgaaagccaactcaaaggatccgccatagaactcatgattgccgaggataactcaaatttctccacttgcctttggaggaaacgaaggtattgatcgtagtctgctaaacgcccaatacccccggccagcagcagatatttggagacaactggcacgtcaaatgatgtgtattgctggttcacttccaagtgaagatcagaaagagtatgaatggagacagacggctggctgaacaattttcggataaattgggccatcatagccttgaacaggctccagaggctgagagaaaagtacggagtaaaacatcaggtgggtttggtgggtagtcatgtgactggcaagtggatcagctgatctctctagcgttatctatccaaacttccagcaccctggagatgtccagcatgggctcctagggtaggagatctctctaccctataatcgtctgcagtcctccatcttgtacatacgatcatagggtgtggaaaatagggcttcccgtccgctcagccgtactcaagccacacgccggtgagttagtagttgggtgggtgaccaccagcgaatcctcactgttgtatgttttttgtctttttttgttcagtttagtaatagtagcatagttatccatctagtcccgctgtggacctctattaataatctttttagaaatgaagcttgacgagacataagcacttgacgtgtatatctgacgctatgaccatctatgcagaggtcacctgacctgatggagataagccggcccacggataattctcggctattctatcttcccagggtcctatcatgtgatccccatctccccaccttttcgactatgtagtcccaacaacaccttatgaccaagaacaagatccccgtgggcctccggctcctctagtggggaattcaatcaacaaattgcgctctatcacatttagtttgggagtgctccagggagttgagaaatgtcttcttaatttaccttactgcctcggaaacaagaacaacaagcagctattaatggatgacggttggattcgctttatcatcaatgcatgtacaacacggacattagcgcatgcagccatgaagcttcatattgatttcggtacgttataacatcaagaattaagtggaccctggaccctggtaatagcagaatttccctcgcaatatttcctccctcgcaatatttcctccctcccaatatttcctggttgttcgtgtaggcataacagtgctcaacaaaggcgagagaactacatcaagcctccataagtttgcccatcttcactgcgcttctcatccttcgtgaagtatttcttgaggcgttcctcgtctttcttcagctgggaacgcagcccgccctcgtttgcgtgatgcttgtcctgggcggcatggtcctcgccgaccttatgtttgtcctgggcggcatggtcatggtcttcaccgtgaggcttgtccttggtagcctggttctcgcttccatgcttgtggtgatcatggtggtggtggcggtcgaggatcttctcgaagaaggaatccttgtgttcgagcttcggggcgtctacattgaacctcgggttagaatctgggggttagaaggcttaagtaaaaagtcacgaaccttcagtcatcgtgggcaaatttgatgaaaaatatatagtgtagaattctggaaattgtatcttatttggggtttaaaaatgctccgctaggtgatgtcaaagactctttcatctactatatatacatctcttgaacgtacgatacttcgtgaactgtcggaatgaaccttggtaatgacgtgttgatcgatctctaatcggccaatcagagggcctcgggaggtatcgggtatagagtcgataggtataagcagtactgtcatagataattgatctacttactccggcacgagtcaaccgatactagcaaatttgaagacaaaactacgtagtgcctagataaccccataaaaattcattgatcagcatagtcaaatggcattctatctgcgatataaatgactgttttcaaatcaattgtatgtgagaatcagtgtccgcaattcgaaatcaacacaacgcatgggataatgtgactatgcaacaaagtattgtgcaaatagatagcggaaagcattgcctgtagagactgctccgggccgtttcacagcctgatgtgcttctcttccctcttttctcgatactatcaccattttaatccaattctcgttcccgtgcctgctccggtaaaaacgtaaaagttcctccggaacactatatctgcccctagctcacgctggcaagtgatctatcttctgtctgccttccctctatcatgtcgcctattctagctcaatggtgccagggggctttgaggttctagaaagacaaaatgtcagcgcatggctcaagaccaatagaggctaagacttatacttacaaatcatagacgacacgggcaacaccctccaccttgttgcaaatggcgcgcgaaacatcctagggtagacaggtttgtaagtataggaaataatgaaattgggcctttgtgggaagggatggagtgggttgggtccgtggtataggacccacccgcccgccttgcggagagcccgaagtataaccaagacctgactcacctggaggaaggagttactgaagtcaaacacttctgcgctcatgaaatccttggtacgaacagcacggagaatcacaatgtaaccccaaactcgctgatcaccgaatacaccaacactgcggttagtatcgagaccagcaaaggcttgagatatctgtgggagaagagttagtttgcacccgtcttcgcctgtgtgacccgacttacctggtcgtaaaggccggcctccttgatcatgctgatgaagatgtggtcagccttacgggcgatctctactcgctccttggtaacgtcgccgaggatgcgaatggcaatgccaggacccgggaaggggtgtcggttcactagtgactcgtgtatgccgagctgtcggccaatggccctcacttcatccttgaacaaaagtctaagcggctcaataagctgtaacagaagtcccgtcagctttctctgcgttgatgaagagatggaaagtatacttacacgcaagccttgctaaacgggccatgttggttagtaagtaaatcaaacgatactagattagctcgacttacgccgttcatcatccgctaatgctggttagttaagatccttttatattcgggacggtggtattgcttacctcaggcagaccgccaacgttgtggtgagctatttctaatgtcagcttttgttctctcttttgtccgtggggcagtcttctgctcccgagacctcgttgactctcttactcttgatagtggccgaaggcccgcggaagctcaaagattcaatactaaaatgttattagtttggaccaggcaatcagcgcagaatgacttacacgtcaggatatagtgtcccttgcaggaaccattccaccttcccggtgttgggggtgttttctgcctccttctcaatctgcaagtcctgttagctagccaaatagcctgtcagagaaggtcgagcgtaccctaatagcctctttctcgaacagatcgatgacttcaatgtcgttagtaccctgtcaccaacacatcccaaacagcttgaagtacgcacaagttgacccaatgatcttccgcttcttttcggggtcagaaacacccgccagacgacccaggaacagctcgccagcctcgacaactgtgagattaatgccaaggtgttcgccgagcgtggccttgacctcctcgcactcattgagacgcatacatccagtgtcgatgagaatggccttaaagcggtctccgatggcatcacgcatgagggctgctcccacagtgctatccacaccaccgctgacagctccaaggacgagtgctcggtcaccaacaagatcgcggatgcgagcgatctcgagctgagcgaagtcgcccattttccaactcggtttagcgccgcagatatcaacactgaagttgcggaggatctcgcttccgcggggtgtctagatctgaatattagagggagttatagtgtaataccttgggggtgacgaacgtgttcgagctcagggtggaattggacgcctagtcaccttgcattagcatattcccttactgggccacaaaggcagcttgggggaagacaaaccaaagatgggcttctcctcatgggcgatgccggcgtactctgagttcttggtgtccgcaatgatcacgaaaccctattagagtcaataaaagtgcttcggaaatacgaagtcatttcactcacagcaggcaggctaactagcttgtcgaagtgggacatgaacacaggaatttcatcccccaatccagcaaagaggcggtcgacattactattaaccttggtgattttgaggtcggcgtggccatactctgcgaggaaagggtcagaaataattttatatggtgttccgaaggttgcaaacctcgagtttctccgcgagcaacgttcgttgaatcgatccgccatgcgatctcctggcaaccgtagctgggtgatttgtattagtgtcgtaccgatgtcgatgttggaggaaggcataccaaatacccctataccccggtgttagtacaggttcagaaccttgagggatgggcggggaaaacactcacagaataggtacattaaggtcaaaaacagcggggtcaacatctacacatatgagtacaggcaacaggacgttcgggggatgaaaaccttacggggcgagccctcgtcgtagacggaagaaggacctagtatcttagtcagacctcagcacaaaccatgtgttaagagacttcatacctccagagaacacaattcctttgggcttccatgtcagctcagcgatcttggtggtacacggaagcagctcagcgaagacaccgagagcccgaagccgacgtaggataagatggctcgtttgagacttcacaaggggagtcagcatttggcatttgaagagggccaggagccggccagcagtaatgaagctccgttatctgaaacaggccgaaagagaggaaagatggcgctcgagatttacatacgccaaaatcaagaacgaggatagtctagagagtcaattgtcagtcaatccgttctttttgcgtttatgactcaattgcgccggcacggcctagggctgcttgatcgcaagttgctgaaagcgggacaagtgggtttcctggctcgccattgggatatgatggtacgtacgtcaaagttgttgtgaggctcttcggcctcgatagtgggagccattatgatcttggtttcggcagggtatcgaaaggattagcggggtgaagtgagggaaaaaaaaaatatgtttggtataattgtaccgcctccgcggccgcctcctaaataggacaccgccttcaaaatgctctatcgcgggtgaatccacgtgacgctgtacgctcttgaagaatcttttggatgtttggtagcatcttcttttcgaatagcaaagaaaaaaccacggcagactcgaaagcgccctgaaaaaggtggtatctgtcaatctagattgggtcgacttggtgacccactccagaattctcacctatatcacttacactcaccccaagaaaaagaaagaattgtcgcatccaggtcatcgtgacgccagcctgaagttcaattggggtatcttcaccagggtaggtgccgttacccctaggagccacaatgttgccattgctatgtcgtcggatagactagtagaatcggaataacgagcagaattggggtttcaagtgaacaagtaagaagacctgctgttgaaaatcaaatcgttccagaccctataagatgtatatgtgtcttgtcaacagctccatggttattgttttcaaggacgtcatggaacatgagcgctgcttatggcgaattcaatgcacatcaatggatgattgcactatgggatacaggtttctatgtaccaaatagattaaacccggccatacctgagctttattattgatcgaaaagtgatgaggaacaggaaacagacgtaggcaaatgttcgcgaccaaccctacgtgccaaggctgatcaatcctgtccgaggtaaacgccgacgcgataacttccaatgcaagtggagctcggaattttaacggacttttaaatgtcatgacattggtcggtttccccgacacaaaattatgacctgagagatcgtcgacgacattggggctcgggtaaaagccggagaccacagacctatgaaccccgtggggagtcgctccactatgattccactttgtcatctcttcccctttgggaaaggcaaatccaacttcgtgatttctacataaatacctttctaatccctatctaggagacttcattatcagtcaaccttcaacatgaagctcctcttgtcactgtgcctactcggtaccagcttgatgaccggagttgccgcgtcgcgcaaagaagtagtaagtggcacgtctgcggttgcaagcaagaaactcccctcaccaagacgaacgcagcggtcaacacatgaagctccaaaatgtgccaattctgcctccacgctatcccttagcgaccctccttacgacaactatttctactccgactgcaatgtagcggcccaggtagtcgtcactagtccattgccagatagcgacctttctttgatcgcacctcgtttgatcatagcttggcctgctggtgacagtggggcttgcgcatacttcgcgcctcaaaacggggtcaacgggtcattatcactcgagctcatcaattcaaccatcgggaagcccttggcacccatctacaccgcggagctatcaaattcatctaatacctatcccagtgtgggagttcaaggcgtactccggttcaattcgtctgcaacactgaccgtgcctgttctgggcagcatccgctcaatccgtgaattcagcgaaggaagtgtccttaggcctaagattcaggatgcgatcaagtttacttctaatagcgatgggagcgcctcgctccagcgactctggttcgataatgtcaccacaacaagcctccatttccgcccttggaataatggcagcaacagcgacaagggcagcatggtatcggtagatggtcgcaccgtgaaattcgaaacaggcgactatcttttttccgcggaaattaactatcctcagttatcccagaccagtccaaccgcagtgctgaacgaaaattctcaggagctaatctcgtctatgccggatcagacgaaggcgctttcatttatgtcatactcaagtaaggttctcgcaggcgcatggcattacctgacctattttggtcgtgactcaatgattactgcgcttttgttggagcctgttttgagtgttgggaatgcaagtgttatggaggcagtgattggttctgttttggagcgggttgatcgaacagatggaagtgtttgtcatgaggagactattgggtgggttttgtgttgcaatttccaatctggtggttctaagacatttgattggaagatgctcttctatatgatatgcatggctaactacgggatagggactatgcgacctggtctaacttgcaaaataatatcccaagcaacgcaatgggctgcgactacaaaatggtctgttgagtaatcactccagtgctattgtcccatcgggcaatatgaccaaagaggcaaagctaattgagtcttttatcaaacagattgattcggactattttctcccgatccttatgcaacggtattttctgcagaattctgttggtcaacagcgaatcaaaaccttcttcaagtaagaatttctaccctcctgatttataaaggaaatcactaatacttcttctctagtacaccggctggctcggccaatgtggcgaatcggaatttgaccttcggcgatctggctctaataaatgctgagcgaatcatgcgtcttgcgggcccgtttgctcataactctatcaaaaagaacctcattcatctcaaagagggccaagatatcggccaatggagagacagtgaatacggtgagcagaaccctgccttctcgaaaattcccagggtatatttgtaaattggacgctgatttttgacaaaactttgaaataggtatcggtggaggacgtataccctatgatgtaaacacggctctggtcccagcagccctgcgctctatcgcaagtcttgcacagaacaacagcatcttttcgggacgcaagaactggtctaaactcgccaatgcctacgcaactgtatgggaggacaagaccctggaatttttccgcttgaagatcccccggtccgaagcacaatcacttgttaaatcctacgtcaacgaatcctcctttgcaggacccaaccaggtctcatccattgacgacgatgttactttctatgcactggcactggacggcaacgacaaactttccaaggtgaaagtaatgaacacggatgactgcttcagacatttccttctcaatattaccaataacgcccagctcaccccgttcctcaaccaaactgccaataacatcagacgcacctttccggctggtctcatgactgatgcaggcatgatagttgccaatccggccttcggtggggatcctgtttatgcaaaaaactggacgacgggtgcttatcatggaaccgtcatttggtcatggcagcttgctatgatggcaaagggattggagatgcagcttgaacggtgtgagttgacaacggaaaagcttggtcataatggacagcagcacgcggcaacacccaaaccgaagttttgctctgataaatatgtctacgacaatgtcaaagccgcctataatgaactgtgggactcgattgagaagaatacttcgcagctctctgccgaagtttggtcttgggtttatcgtgacgatggcttccaggtcaccccgctaggagtgctgccaccccctggtggcggtagccagataggtaaggtcttctccggttatcagcatcatccgatttttttttcgtgttccttttttgctaattgcctttatatctgtagaatccaatattcaacagctttggtctctagcctttttggctgtttccaggaacaaagcttataaagattgaatgcaaatatctcagttcatgccgcttttatccgattccatcggaattcaatagatggacggttaacaatggtggaagacggcagctaactttccagtttactttcgaacgtgaaaccttccataccgatatgtgcagcatactttcatctgtatatactctttcaacaaggcaagctgctacaattaatctctacttttcatacttgcgatatatatatgcaagttcctatccgttagtgcattatataaaacaaggcatattcactactctcggtgctactcttttaattgttgactcttactaggctctatcacaactataaaatctctttccatgatgacgatcgttgaaaagagcgagcagaaacatggatatggaggatttaactaccgcctaccaaagatatatgcaacacagtgacggtaatggcgaacacaccttgaggatatcagtgtttaactagactgttgtacttctggagacaaaggatcgttcagatgatagcccttagagcaccgatagaggcgggtgtttcccacgcaatttccaaagcaggagcaagtatacggaggaccggccggaaaaatatctgccaagaccagcctagataagaatatagtgagtatggacatcacagatcacacgatgtccgaagtagctaaagactaactttaagccaagtacgactgatacgaactgtctagaggtccgttccgtgagactagaggcacccacacgccatactctgatacctatttagcttcagctgacgctggctgattccccataatgtgagtgaataatatcagatacagcacaagtattcatcaagttgtctaggtcagacctcgggagatgaaggggtggatctcctatattcgtcttagacaaatccttggcagcctcgaccatatttagagttccacccaatgtaacctaaagctgtggtctggtgcttagtaagacgtttaattgaaggcaatctcgtttagcctatttaatcaatttggtggtaatgcttggctttatcattgagtgaataataaatgcctatactccgtacagcttcgctttatttcaccgtgaacttgattggaccacacttaaattgataatatctccacagagtcgggagtaacacattagcagatcaagcgaaaaccatgcactattggcccggggagacaccggacgagaagcagggagggagacgaagtgatcaaagaaagaaacagtgaatactcatttgctcggtgtctcggtgtctcggcacagaaccgagaagtctaaataaattaaaataaggccgaacgaacatcacacccgagcacatgcagcagcaaatgtaaccctagctaaagggaggcgattaaagcgaaggtgatccgtcgggattccggctgccaagtgcttacctgctgactatagccggggtttctcccacgtaatccggaatcaaagtgacatgcattgcctaaattagggcgaaagtgtcggacaaagcgcaggatgggttagcgtcaaaactccaacaaattagcgtcaacggacctaccttatctaaagaatgctaggaatgccaccggaagtcggtggatacacatgaatatatatgctttctgtatcgtgctttgagactagtattatcctacagatatcacacctattaaaagattctagagactgttgacatataaaccaaaatcaattagaacataagacaggcgctagggaactcaatggaaagtagaaagggtccgagctctccggggctagcatgtcaacatcttagggcaaatgttatcatcagggccaaatagggggttctcaaaaaacgatcagggttcaattgttttttattatcgcggtgcgtggcaagacagttctgtcgccgcaagcatggtggctcatttcatggctgcatggtatcataaacatggtcagctcagtggtccgataagaatttattttggattataaagaggatcataggaccgaataaaatgcgcgatcagctctacagccatactccagcgtactgtcctcaagtatgtccaagtcgcctgtagaaaccagtgacttgtccacggtggctagccaggaagccattggcgagaagtatcctgctgctgtggttactaccaaagatgagcatggacatggtgaagatgacgccgacagcgatccggacgcgattatcatcaccggtgctgacgcagctattcatctcttatctcttcgagatgactttgacacggtcttgacctttcgcagtatattacttgcttccggccttgcgtgtttccaggctgtgatgaaccagatttatcaggtatttccaatccatctattgcccatagagatactaacaactcgttctatagttcaaaccgaccttgattacgattcaaggaaccttcatcgttctcatctcctactttgtcggcaatgcctgggcgagattccttccccgtggcgataaattcgaagctcgctggagggcgaaaggcggccagggagccctaccatggtggatcaaggtcataaagttcttcaactacgggccatggagtttgaaagaacatgcaatctgttcaatcactgctacgtcggcctcaaatgcggcgtctacctcaaccgtgtttgcagcacaggatctattctacaatcttcccctcacccccgcgactgtgatcttgagtactatctctattggcctgtttggctacgggatctgcggaattctgcgtcccatcgctgtctggcacacggaggccgtctactggagtagtttgcctaccgtcaagactctccagggacttcattggcaggaagtcaaaaactcgaaaccgcttcgatacttttggtatgcattcactggcatgtcaatatacgagatcattcctgcctacatcttcccgtggctaaactctgtgtctattccggtaagtggtatcgcaatgatctcttcagatgaactttctgattatgagaatctcattggaacaatttattaacttcggactttatagtgtttggctgcacaaaaggccactggggaaactggtgccgtactcaacaatatctttggtggggcaaccaacaatcagggtctcggtctattttcgttctcgttcgattggcaatatgtgagatgatgtccccctataacacattgatctatcaagtcatctaacagaagcagctcacctctttccaaacctcactccctctcaaactgcaaattcatcaggcagctggacttttttcctgcttctttattatgataggcatttattacggaaatggctggaattcgagatcacttccattcatgtcgacgagaatgctcacgaacaacggcaccacataccccctgcacgacgttttccccggtggtgtcctcgacgagactgccctgaccaagtttggcttgccgaggctcactggaacttttgcattcgccatgttcatggccaacgcagcaatgggtgccctgatcgttcattgcatcttattttggggcaaggatatccgtcgctcctataaaagcgcgagagagggtagatatgatgatcggcaccatgatcatatggccaagcattacaaagaggctccgtggtggtggtatatcgtcgtgcttgttggcagctttattctcggcataattgtgactgtgaaagaaaacatcaccttgtcggtttgggcatatgttatttcactgctagtaggatgcattatcgcccccttcgtgagtacaacgtcctcgatactgagcttcatgcagaaaaactgactatgaccgtgctatagagtgtcatcctctattctcgcttcggtaatggtattgcaaccaacaatttgtcaaaaatgctggctggactcatcctgcctggacgcccggtcggtaacatgtacttcgctgcctggtcgcataacgtcatttcaaatgcggttatgctttccaatgacctgaagatgggcgaataccgtgagtatctatgtcattgttttgatcaaagatatgtttttaacttatctcttagtcaaaatcccgccccggatcatgttcctgacacagttgtacggcacagttcttggtggtttcgtcaactacgccatcatgatctctattgtgtcaagcaatcgagcgcttctcaccgacggcaatggaaattcctcctggagtggtgcaggcatacaatcttacaacaccaatgccgcatcatgggctttggctccctatatctataagattggtaccccatacggggctatacctattggtttagccgttggagctggtgctgtggttgttcaccgcatcttttatcacgtgagtaaccccatagccttccctattgcacttggaactgacatccgtttgactcttagtttgtacccaaaatcggaaagctcgacgttgcggaaatcaatctcccgcagtacatccaatacgccggttatattccctacaaccaaagccagacctgcgtcatcttcacctggatcaccgccggattctacgttcaatattatctccgcaactataagccgcggattttcaaggattattcatatctcattaccggcgcctttgatggtgctagtttgacggttctcttcatcctctcgtttgctgttttcggcgctggtgggccttcgcacccattcccaacgtggtggggaaacaacgataatgggaactacgattggtgtccggtagtagagtaggggaagggagttagatgatagggaatttgaatccacagagaaagttggtcacgggagtgtgaatagtgctgtcgctgaactccgagccagaacaatgtcataattattatttaagttgcgggccgtggatctttgacgggcgaatatcgacatattcacggggcgagaaccagatggcggatagactgtagtctctgcggtagtaggcagtggttcgaacaatagcttcggtttattcttcgtcgaaacagtattcggtggcggaacgatatccatggggcaaaagggtagccattctggaggtttgtccggtacggggtcctagcaagaatcgcgactcgccagtgtacctccccgaacacttcttggggccgatgttatcgtatggagacgggactggatcacggacctgagtggctagaattcattgcacggggacttcaatagcgtttaagggaagttttactgttttcgcgagactattatctttccaagggatacatcacagtgagctctgattggctagtgacataaggacctcgctcctcacggtacgctctccaaccactatatcattatcgagctggcctatgccattgctatagtgaacaaacaaaaacaaaaacatacaacagtgaggattcgctggtggtcacccacccaactactaactcaccggcgnnnnnnnnnnnnnnnnnnnnnnnnnnnnnnnnnnnnnnnnnnnnnnnnnnnnnnnnnnnnnnnnnnnnnnnnnnnnnnnnnnnnnnnnnnnnnnnnnnnnnnnnnnnnnnnnnnnnnnnnnnnnnnnnnnnnnnnnnnnnnnnnnnnnnnnnnnnnnnnnnnnnnnnnnnnnnnnnnnnnnnnnnnnnnnnnnnnnnnnnnnnnnnnnnnnnnnnnnnnnnnnnnnnnnnnnnnnnnnnnnnnnnnnnnnnnnnnnnnnnnnnnnnnnnnnnnnnnnnnnnnnnnnnnnnnnnnnnnnnnnnnnnnnnnnnnnnnnnnnnnnnnnnnnnnnnnnnnnnnnnnnnnnnnnnnnnnnnnnnnnnnnnnnnnnnnnnnnnnnnnnnnnnnnnnnnnnnnnnnnnnnnnnnnnnnnnnnnnnnnnnnnnnnnnnnnnnnnnnnnnnnnnnnnnnnnnnnnnnnnnnnnnnnnnnnnnnnnnnnnnnnnnnnnnnnnnnnnnnnnnnnnnnnnnnnnnnnnnnnnnnnnnnnnnnnnnnnnnnnnnnnnnnnnnnnnnnnnnnnnnnnnnnnnnnnnnnnnnnnnnnnnnnnnnnnnnnnnnnnnnnnnnnnnnnnnnnnnnnnnnnnnnnnnnnnnnnnnnnnnnnnnnnnnnnnnnnnnnnnnnnnnnnnnnnnnnnnnnnnnnnnnnnnnnnnnnnnnnnnnnnnnnnnnnnnnnnnnnnnnnnnnnnnnnnnnnnnnnnnnnnnnnnnnnnnnnnnnnnnnnnnnnnnnnnnnnnnnnnnnnnnnnnnnnnnnnnnnnnnnnnnnnnnnnnnnnnnnnnnnnnnnnnnnnnnnnnnnnnnnnnnnnnnnnnnnnnnnnnnnnnnnnnnnnnnnnnnnnnnnnnngtgggcggacgggaagccctgttttccacaccctatggtcgtatgtatttgatacggcgctggaggggaacatagagcaggtgaaaattatgaactatagctgtggtaggatagatagagacggcttatgtttcatcattactattatgtcaggtgacctatgctctgtagatggtcatagcgtcagatatacacgtcaagtgcttatgtctcgttaaggtaaggcggcgttgtaaggtagagcgaggcacttgaaagcggcgtgctagttcgcgaatagtactaatttcttggttctcaaaagcctggatagctagtagtatacctatacgtatgtaataaaagttatacagtcgataaaactatatcttcttttcatgcacgccttgatgttccccaagatattaccgaaacaggcaaccccgagcgcggctgagcgtttatatgcgaaccttggaataaagaaccgtggtatatcttatctgattctaagaccaagagtggaagaaacataaaacaccaggaagggtaatatttgagcaagcgcaccaccagttctgtatacacaatttatcgaccgaagtacttgagctccaagtatcttgccggtaggtaagtcaaagccgtcacaacaaatgtaaactcgttggcaacatcaccaccgtaatctccaatcacgcgggcaaggggaccgataaaccaagtctcatccatgcccatgcaccacgccacaaccccaagggcaaacgccacgctcgcgccaattcccaacggaagcctagccgggtcgttccatccttcgagatcatagttttcaaagttgcccttacgaaagatatagtgttcctggaacaggataatggcataacttgtgcaccagtatcccagcagactcaggaaattttgaagatattcgttcagcttttggcgaccaccaattgacaaggcgatgatacaggcgaagcagaacaatgtccaaagagatcgaggaatgcgagcgaagggtcgggcaagttgctgaaaggagatagcggaactataaatgctaatgacgttgacgttgataccggacaaaacgaggagcgtaaggaggaacttggcgaatccgcgaggatgaagcatctcttgaatgagatagccaatccctttctcatatgcggcggaccagtcgggcttagtgttcaaagcggacgcgaccatgcaaccagcgaccatgccgatcgaggtgggaatcgagataccaaaagttgtcatgaggaaaatcttcaaacgactcgtgttggcaggatattgaacatagtagtcgctagccattgtgcaccacgaggcactggatccgtaaacaacggccattagactgagaacggcaccggagagagtcgaaccagtcacggtagccggggccgcattgtctgcatattcaccggtctcgccgtagatgatcaaaaaaataaccaaaaacaccatccaggcccatctctcgtaaatcaaaatggccttcaacccgacgcaagaaataaacagggccaccacagccaaaataacaattcccagaatcaacgagacgtggccatcggagactgccgtcaacgcaagacccccagtgatacatgcgacagcagcccatcccatttgctggataccgttcagcaaggcgaccagcttattaggccaccaaccaaagctgtaccgactaacactgatttgacgtaagccagtcaccgcgccaaaggttgcacagaacccagtcagcgatgcagccaagattgaaacaaatatggtaatgaggatcgattgtttcatagtcaggccgaattcccagccgaggaagccagtcgcaaagcaggaggtgttcatcgtgccactcgcccacagagccgccattgatatctcctccacccatcgtacctttcttttatcttcagcacgcttgcgctcgatggtatcaggctctataccgagtttcttatccagtcgagcctccagggcgcgaatcctagccaggataccggtctcttgagaggcattatcgtcaagtgagatcacctcaggtgaattgtatttttcagttgggtgttggcctgttgcaaggcctttctccggatcataggccatgatttctgatggagtgagacgcggcgatgggaaaacaaggggcggcactctgtggccacctggggaatcggtgaatttttcaggctggggaaaaaagataaggcttgtatgggagaaggtttgccagctccactccggcgctgtttcccaatctggtacataagtagttagcggattcagtaggttacattggccgcatgtactccgtactaactggttagtttgaatcttggcttcctttcggttgatatttcctacccacacacgccacacgggccccttagtaattacgtggcgccacggggctatctacagactccgcttatcgaaaaatgtaataagaatcgggtgtaggatttcgcgagtggtgaatctatgtgctattttatatacaatataaggattggcctacattcagggcttaggagttcaaaacttgtaaatattggagttgtggatcacaaaaagattggcgtataacagtatccattctcgtctgtcaataggtcggtgttggaatagataacaagccttgcccagaaacttggctcgcctcgggaggctaatctcacccgccctatctgatactcgtgaagccacgtgatacggcacgagcaatacgctcaccctctggagatccttatggaatatcgtttatcgctaggaaaggaaatacaagctggaggcaaggccccggcgagatttatcaccctgggtgtgtaggcgggcggagactccggtgagaattgtcaccccttctcgcccacactcaccgtaagtcaaattccccgcccactttagtgtctaaggtacctcaagaattggccgcgtaaattatggaaatgaaaataaataaagaaaggaaaaaacatacaacagcatgtttaaggtgatggtcacctaacgcccacggatcgggcatgggcggctccccgctctattcagggcactccgggctgatattcagcttgtatagcgaaatgtaacttccgaatccatatgattcagtcgaacctcgatggcactagaaagtatcgtctccgcctcggtataattgccctatttcctatgcgtaacgtgcagcgctttcaagtagtgtttcccaagtcttcagtgaatcctatccaaagggaggtctgtccgttacaaactcagcatgcggaaaaagcaacttgcatttatcccagctactatcaacccctttagggaaatgcacacagatgttcaattgaccttcttttgtgttcaacacatatatcaccttataacctacatatcatttagacacggatgtacacttgggcttcaagacttaaactgcagccacataggccattccttggcagtagaaaaaaataaaaacatacaacagtgaggattcgctggtggtcacccacccaactactaactcaccggcgnnnnnnnnnnnnnnnnnnnnnnnnnnnnnnnnnnnnnnnnnnnnnnnnnnnnnnnnnnnnnnnnnnnnnnnnnnnnnnnnnnnnnnnnnnnnnnnnnnnnnnnnnnnnnnnnnnnnnnnnnnnnnnnnnnnnnnnnnnnnnnnnnnnnnnnnnnnnnnnnnnnnnnnnnnnnnnnnnnnnnnnnnnnnnnnnnnnnnnnnnnnnnnnnnnnnnnnnnnnnnnnnnnnnnnnnnnnnnnnnnnnnnnnnnnnnnnnnnnnnnnnnnnnnnnnnnnnnnnnnnnnnnnnnnnnnnnnnnnnnnnnnnnnnnnnnnnnnnnnnnnnnnnnnnnnnnnnnnnnnnnnnnnnnnnnncttaagtacggctgagcggacgggaagccctgttttccacaccctatggtcgtatgtatgagatggtgaaggaaagagaatcatcaagtagttattaaatgcagagtaggaaccaaatcgcatgaaattgagtcaaactacacaatgcgtatgagaattcgctcgttgacattatcacttctgcttttccacaatctcttggtagcgatattcacagtagtaaggtcaatcccattttgagtagcgaggtcacgatctacgatagatcgctatcattatgtgcttcatgtttgcttgcttgctcgtttgttcactcgcttattgtttgcatagtctgctagtttgcatttcatagattgttttctagatagctaagcgagaaggttcgaggtttgcaacgtttgcaaagtggtcaactatatcaataggctgcttccaactttgtaacttgcttcttctttctctcctcatcttagttattttgaattgaatgccctcttcggttgcaagacctggcacgttacagcgagcacgaattcaatcaacgattgttgcggaaaatcaacgaataaagcaagaatcgctgggtaaacatctgatattcaagtatccagcttatctatgtgttcatatttaagcgctccgcttcccattttaataaaatttcagaattatacacagttggtatgatggttcaggctgagtgtttgcttttgcctggttaagcaatctcgtattagtttaaggcttcagtatcgtgagctgaagatttccgggtgaaagcgagactcgccatactagccagcgtgtcgggatggtcctcgccgagctttgtcttgcatgtctctattatctgcacctgcagctgctcggcattcgccccctaaccttcattacagtaaataattcctagtgttttccagatgaaagccttccctgtttccttggtgctaatacccctcaaatctatattcacacgtctgggagatgcaacatagagatgccgacgaagctgtggcttatggtcttctttgataagttgagagcatgcagcaagcataaacttgatgtaccacccctgccatttttgattttggtcgccacaggttaccctccactgaacctagctgtgcattgtggtaccgggccactttccttgcactcgctgtactagactgtagtgagccaggacatctatgctttcattatacctgaagtgcgactgccccccaagcctcgcacgactacttcatacgggatgtctctctcttcgtgtcgtattgttggttttctttccagatcattccatagctggtctcgttgtgtatagcttggcactgtctctgtcgggacgaaatagatgtgcgttggttttgtttgcgttgctaatcaagacatctgtcagctggtgttagaatccaattaaagcagatgatgggctgaccaatttttctttcgctctcggctttgagccatcttttgatatatctcaccacatcttcatacgtttcatcatttagagactggcatccctgaatctccctatgtaatctctctgctgaacgttttattgtcccttgaatcactgctgattcccggtccaccacctggattgttatataagttgcatatcgcatatgcgggggatttgaaagctcacatgggtgattgctatgccccatagaaattctctctgagcttcaaaaacgcaaagagtcttgcgagacatatccttttcgtagataaaagagtgaattcgatcgtataagtcgtcactagcatctgagccaactttcataactttcaaaagagcggtatctgaacccctccagtatccaaaaagagaaattatctctccaataggagtgagttttgaacctcgatgcggcgtgctcaaaaagacaaatcctcccagactctcgagaatttcaggttccaaatcgctattttgcaccatgttcaccacagcctgtttccctattagttcaactgaaaataacccgatgctgaaccaaccttacctggtcgatgattaaaccaccaaaactatagccaatcaaaatgataggtcggcttttctcctagacgaattaagtacctagattcaaatcgaaatcaagtccaatctcttacctctagggtctctcgcttactggcgagagcgtgaatcaagtcatcgcccaaatcttttaacgacttgctcagggcattgctcatccatctcgtatcgtaattaaaggccatgatgcgacagttcaaattttctttcggtaacagatcacgaacccatgacaccttttcagatgagcgttctgtagttgtcagtggattcgaatcaagaccgtgaacgtagacgatactgacaagacaattagccatcaacccatgaagagaccacaatttacgggcacaaactcggcaagaaaggtatctcgggaggtcacgtcggagggggaaaagattgtgatgcgctctcgcttcatacacacagagcctcggaaaagaacaacctgcaaaggggatagagcagcacatatcaaaaaattgaacatggtcaatagtatttttggaattgaatagttaggaagtgagaagatgtcactaatcagccatgaaagagtaaagagggaaaaactccacactcgatggaaaagcctttccgataggaacatagcccataaaaggtatgggatggtgattgtaaacagcatattgccaatacacagttaaccaaatgtaagttgaaaatatcacgatgaattatttgaaagagaagcagggggtggatagggaatgggagctggacacgaatttggcccctcagccaaaaaccgagtcgtcagggtgatatgccaccctaacgcatgatggcggggcccagatgaattatctcgaatcaagcagatgcattgctatcctacgtctgggttactgttaccattaccgccctagaggggccaggtggagtctactgattgcgagtcggacgtggtccgtatcaaccgtcttcatataaccgccatcgggattcatcacgtcgagattcgaggttgctctctagtctatatatagcacatgcgttagccccattaattgtgaggggtgcgatcatccgcgtctcagcttgcaatatttcttcatacacgaagcgttacccctcatcggcgaagatgttctcgctattctctcctcaggtctttccagcatggctccgttctccgagaactcacaactctgtgacaagctcacaataaccgccgatggccacttgtcgaggcgaaagagcaatcccatttcttcaactcaacaattgacagagaaggatcatcttcctggcgagccaaggataaaattggaggatgaccatattgtcaaaactctccagtccgagttcatgacgcgtaacctggacaaactttcgccattcctttggctggtcgccaaacaagatagtactcatatatcagccctcacccaccaaatcgtgagaggacgtgaagtgattatcacggaagatccgggcctccatctggtctggatctacgatcgagtcttcatcaagccaatgcccaagtatctcttatcgcacgcattttggcagttttacctcgccgacagaaattcaaagatcccaaagtatcagcaacacaagatcgctaaggcagttctcggattcatgcgctcgtatgcctatcttatacgccataaatcggacttcattcttgccaccaatgataatcaccgactactaccgaaaaaaatcacatattcatctttcgtcaagttcattactgcatttgaggagatatgtgacgattctgtgtctccacgctacaaatttggcgaactgcgtctttcccgtctgaacttttggaccaagattttcctcggacgtctcatgtatcacaaggtgcatgggcagtatggagcgtattttgcacgttcctacggcaccttactgttcatctttgcagtcttcagtgttttactcagtgctatgcaagtggcattagcggttgttccacttgaaggtggatggtcagtgtttgcatatacgtctcgtggatttgcgatattcacgattatctgtgtggctttgattataatatctcttctctcggtttttattgttctttcttcgcgagagattctttatgccgtgaatgatctcatcttgaagcggagaacgaagaaagttggcaatagtgtgtgaaagaaatgccgctatgatcctttcgagctacatgtaatcttctagactttcgtacagtacgcatctgactcatataattgaaggaggagcatgtcctcggttctaagatcatgtgactctgcggcacgagggcaggagttacattggacagtccacgccgagcattctgttggccctgtatggggtgcgggcgactaagtggatggcggcttcgggatggtgcgttgcccgtactcgtgatctatgtccgccgggaatgggaatatcttgagccaaagctggcagggaagtatatgtgatgttccgcttatctgagacttcatggatcagtacgctgacaagtatgatcttggttaaatgtgacttaaaatcaaaatactccaaatctaatcgcgaaaatgagaataattgtacaattgcatggactggcaagcaaatatcaaacaggaactgccatgcctgggcctttcttctcagcggtattcttaacaggatgaagtagcatagatggaaaacagagtggtccgtataaatcctctcgctagaacaagaccgagtcagctttaatgacgttatcttctcgaatgttcggggaagagaatgatactaaccaagtcaccgccatcgaaccaatttcgaccctgtggatcctggtgctgaagtgaagtgatattagttctgcaaaaaggcaaggcaggggggtaattctcacataactaccgtcggtaaattgattggggtcaatcgggtagcccagccatcgccggtaaaggtcttctgaggtctgggtagagaacatataagataatcgatagaggatgtggtcccagcggtggtcccagttccaaatactatcgcttcccccgttgattttctggggttcacctgggtttaagatgcgtccaagttctttggctgtccatttgccatcaatgtacacaggatgcggtacatggacggctttgaggccatgccagagggcaagtgaaggagctgtcatttcggaaacaagtcccattccttggatttgcagatcatgcatttgttgcaccaggatctttgatatgcgccccattgcaacgggagatgctcggcgtggagtattctcggacacaccccatagtctgttcgagaacgtccactttgtatctacggggtcgaagatcggtaagaaggagataaaatctgcttcttccccgacaccccattcgtacttatcgtcctccggagacggcgtagttggcttggggcctactggcgttgtatctgaggtgccctggggcccccaaacactgcctcggccattcacagaggagccgaccatccgtacaaagtcctgccagctcccgtgtatccctggaaggtagaaataggcgttgcgctcccagagatatttccgcggttgtctctttgcaaattccacggacttttcaaggaaatgatagctgtgccccataaatctggcatccatttccagttgccagtagtattcaaactcctgaaacgattgcgaaaatatctgaaccggttgccaatactggtaattggtgctgtgaatctgttagacgacatgcaatatagtgatcagcctcggaggtatcgaacctgtgttcatcgactttagggtaccaagttttcaaggtctcatcgttaaaaagtatggtcacgtccaaaaactcgcgtggcacaaagcgagacttaacagattgcatagcctcatcatcgtctgtatagggaatgtccttgtctttaacatgacacaagatgaagacctcatactcaccgccggagtgtaacgacagttccatgataagagatcgcacacattgtttgaggttctcagtccaatctatatcatgccacgcacgtagtatgacagccgatcttgatttgtgtttcaagtcgcgagtagcagagctcggtcgatcgcggaggaacttccttgaagaaagaggagggtggagaggaagaatagatttgatcgaatgagagtcagtctgcctcgtcgagtatcttgcggcattcctttcaacgcattgtaactgcagtgctccccaattggcttcactcaaatttatgtgtggttggggatcgtcactgtaaccatacgcgcccaatcgagagaagcggttggcacaagtatatgcatcaatacctattgccgcatacgatccgagtaagggcaagggaaaatctatcttatctgtcaaagttgtctcgccattgagggtgggttcgcaaatacctcgaggaattcctggataaacggagaccatatcttggatattcgaacgactcaatggccttcctcgtgggccgtcacaagcaaaaaaactgccgagaaactccttgcgccactggtcgctgttatagtcgggataagggtcatagactacaggccttgggggttcaggatcatcacttccatgtcctattgtcaaagtcccgccgcgataaaagttgccctccctatcaatcacgcgttaatatatacacaaattgggagtcagatggaccgccacataccggacatcacgtagagttccaagtccgatcggctcatgggcaaatggcgtttgatcatcttgtgggcgtacttcccgcgacccgctgcttactagatctccaggccgtatcacagtagacctggattgccctaggtcaggccatgagccagaaggaaagtactgcagatattcttgccttcgattcaagacacttccgaaaatgaacaataatagtatggccaacagagcaagatataatcctcgtgaataacgaaaaatattcaataatggagatagattaatgttggatcgtctcatcttcaaaagagatgccatttagccagactgcgatcgatatctgggtgaacaaaggaagttggtgaaaggacttgacaaagagagaatgagcaaagacaatgtccgcgatagcgccctattaaccatgcaagaccccgctagtgagtgccacttttccaggatccagggtcatcggcgtatcgcctgaaagcatcctagcaagcccggcttcaacgctaataagtctctgctggtctatattgtatttcgtcattcgataccaggacacacgatgcaaaaaccccttttcagggtcatgtcgggctggggaccaaaccgatgtcgcatagtgggtcgggtgagatcgctcgtgctagacgatgtacggaggagtaccagtgggctgtgtccagcgggccgctcggagcgaacagacccgtgtatattgggctaggctccacctattgcctcatgtctacagtgtatgtgttacctactctctatctcgttccctcatctgccgctgctgacatcgttccagatactattgactcgttggcacccatcatcccctattaccgcatgtactaacgattaccgtaacatgacagggacagggaatgacaaaagtacagcacggggccaatactacgcagtagcgtgcagtggcctgatagggttactgagagacacgggattccgttgctccactcagggcggctagatacatattatttcccaatgctcccttccgactgtagcgccaccaattcgccttctccccagctgaaacgaaatgtatattttgtatgctgatctgctagatacttctgatggatacattactactgcaggctttgtctgacctctgtcatatatgtatagttataaaatctactccatcaaggctggtagtctagatttgaggttgaagatgagcatgtaaatggaatgataattgggggcggcttcaagatgttttatcgtaattttaaattgacaggggtttgagggctctcaacccgggctggaagcgctgatcagttgaaggatgttgctcagtactgcgcaaagataaaacatatgctaaggccactttgttttccttgcgattctctgcttctgatatccttcagccccgatatagcccgggttttgaaagcggatttgaaagagccgctctttctttctattgaagcagcattcatacatcacttacactgacatggaatcctacttccgtctcaagggcctcgtccttcaactgtcgcttttgagtctctttactgcagtcttcgccgtcgaccaatgctattatccaaatggagcgacaagcacagataccccgtgttacaccgatggagatttctctcactgttgcgcaaacacgtctatatgtcttaccaacggcttatgcttatcaatgaagcaacctttctcgctgtctcgtggtggttgtaccgatagtacttggagaagcagccgatgtacagatatatgtggtaggtctgacattcatctaacataatctatatcctttatctgactcctgttatcagtcaaggcccaaggaggtgccggctcagctgttgtatggctcgacgggagtgaaaataacgcgacctattgttgcaactcagtccttgttgatccgttttctggggaaaaaatttgtagcaacgtcgatggtgcaactcaaaccagttttaagatcctcgacggatacattattcccagtgccggggttctctcaaactttgaggaaatatccaacaatacatcttccttcgttgccaatggtaccgatacggctgtcactacggctgtcactacggctgccactacccctgtccctaccgctaccgctaccgctactgccagcaacgaaaacagctgcaatgagtctagggaaattgcaatcggtgcaggagttggggttcctctcgcagctattgctctcctatccattggatgggccttttgggagagaaggaatcgaaaattagcagcccttccggcagcccaacctactcctctatttcagccatcttaccaagtggcccgtggccacgagagctaccatgcatatgagttgaaaggatctccaccgaagcctgcggagctctacactgcctagccccgtgagtaggctatgacatgtgataagcaggtttattatggcttagtatttatgtgtgattgggctgtgggaagagagatactttagtgaagacttgattagagcattctataattatggagatataaatgagaataacagggaattgacactgtgactagagaggtgaatgaagatggtcttttgagtggtccttctagatgtccttcttacacatacagcgtataacctttgatgatatagttctatggttgagtcgttcctattcttaccgcagctatgattacgcgagaggaatgtttagaatataacactattcctatgagtatagattcaagatatattcatctttcttggaagctgatatatatgtctgggacataggtcatggctatcacgattttcggaagaatgcaagctcaagtcctcgaagctcattcgagccagcaagggccagtcgtcaggaagacccaacttcttgatttctcgacaaaccaagtcgccaacaagagcatggacattctgcttgtatttatggctggtgacatattcggagatcctaaaggactcaggaactattagaaatacatagtgaaatctgacagaaatacagttctaccgcataagtttccgcggaaatttctctataccgcctttgcgcaattacatccactatcttcaatgattgaacattgcttctaaagaatgatatataaaatattaaaacttacattcaatacgtaggctatttagctattacgatcatatttttatatatttttctcattagagatggatgtctagttaatgttttaagtatgtggattgaaatatatattttgacgattgggctggttcgcggaaacttttgcggttcgactgtatgcagtacgaaaaagtatgatgtaatttaacagatatgtaaagtctctacggagtactagctaggaaatgtcgaactgaacatgcacgtttctgtgggattggtcatcccgtttcatcccggatgagctgggcttttcacctggtctcatcctcgaatttcactatggatccacctcagtgttcgacaaaatcaaataaaagcccgatcatttgatttaatacggaagtgaagtataatatacaggaatatattatgcgtgatctaggaaggcctcgagtatcattattcgaataaagttgcagataccctttgaacagggaagcatataagaaattaaaccaatgatataagaccgaagacctcaattgcctatgtttttgtctctcgtctccagaaaacggttgcatggtcataggcactgccaaaagcacttctgtgtcgacccaaccgaacgtaatcaagcctcaaccgtgaaaggccacatcgctttcgcatcctccgcagatttctccccagaaaccttctcgatgtacaggtccagtagctccccattctgccttcttttctcgtctatatccaacggcggcgcaatccacccctccgcatcagtatcaagacattcctcagcaagcgcttgaacgtcatgccaggctcggtattccgcaaactgacgtccatgtgcatcgagctcgtcccggctgaatgaataagggcattttcctgaaaatccaagacttgaccaattctgtaaaatctctatcaagcattcgcggagcgggacaatgcccacttcggagatttctccgcatcgggtgaatagttctcggaagacacggggtacgttcatggcattatgcgctgctctgtcttcgagataggtcgagacctcgtaagcctttgctagttttacctgtgaccattcgcgtattgcaagcatcttgccatcctcatctagggtatcgaaatcatcgcgcagtttcacctcaaatatccccttgacataatcgtaagtctgcggaggcttcagaaatatcggccattgcgcctggagaaatgcggggagtatagacgttgactgaagatcgataagggatactattcttgaacattcgtctggggcgacaaagatatttcccatatgaagatcggtgtgccatagggtaggctgacaagctcccgttaatatttggttcgagtctaaaagcttcatgaggttcgctgtgacttccaagagctgggtttgttgttcaacggttcctttgtaaaagctcgatcggctttgttggcctcttgatattcgaagcaattcacgccgtgtaatggatattcccaagcttgaaattgaatcccctgtgaaatgttagtaggtgaactgccaggttgtataggtaacgcacagggtccttggtcaaattctagagtagtatcaggattaaacttcttatcgcaagaaggtccaatgcagaaagacttggatggatcgatttcatcaccgagagacctgttcggtcggctcatgtcagtccggaggtatagtcctccgtaagcagggaacgagatagccgacagctgagcctcaagcttggtcaagttcttgatcagctgtagcctttcgaattcagtcatactcctccatcgttcatatagaggaaccccggcagctttctccataactatatattcggcgccaacggcattcgaactatccgacgaccaggaaagaacacgagggacaggaatgctagtgtgtctcccgactgtacgtcttagccactcgactctctctggaataggaaccatcataccgtattctaaaactcctacttcaccagccgttgtcaatgaaggcggaccagcaatgcggcatggaattttggctataacttccgttccatttgctttcctcatcaaaaaagccttgctaaaccccccttccatcttctcaattgctgtgaccggactggaatccccggccgtggccacggtattgcaaagcgcatccacattgaaccggacatatcgtcggctgagctgatgttcttcatcgaccaggaaatgactattggtgtaagcgaaaaggtcctcacggagaattggtatgcctggaacatcagcaacggtctccagcacggacttcctcgcttacctcggcaggttatcgacaggggcccccctggccggccatgtcgcttcaacacatttctgagaattgacagcatttcgcatatctacgggcttgaaggaagagtgcgaataaaatgaagacgggatattgcttcttgacggaatgggcggcatatcattcttccatgttgtcgacgactctccctacttgtcaacaaatcaatctgttttgtttcgagtgccaatgccaatttcaaagttccataattcagtgaaataattgtagtagctaataatatgtatcgacttgaagtgctaggttatgctatacaaacacaatgtcggttcaacatataaacagaacacgaaatgtaacagcccaatgtatatgccggagcaattcaaaatataccaagcttagaccaaaagccaagctaccaacctaattcgacttgtccgaaaatgaaaccagagcatgataagactcagtcaaaggccacaacccctgagcaaaaccaagcgctccagcaacaagaagtacataataagccaccgtccacccaacacccaagccactgttaccccttaccccaacttggatactatcatcagaatcctctttaccccgagtaatagggggactgatatattcacccgcctggacccgtccccagaaccgcggcaatccacaccagttacagaaactatggatgagaaccacggccagcaacgagccggtccgcaaatagacaaaggtcgcataccagccaaaaatagtcgtgtagccaaactggaagagcgaccgcagcagggcggccagagccggggtgtccggatgggtcagacagaactcgtaaaagtggtgcacgtgcgcaatgccgaaatacagcggtgccaggaacacgatccggcccggcgaggtgtgtgcgagtaaatgcagcggtaccatggcggatcgaaacatgacttcttctgtgaaggggccctaaaagatattagattgaaatgttgttaaaataagggagggaagaaaagatggaaaacgaaaagcaattgcataccgcgacataatttctccagccaatccagccaccgagactctcagagagcttactacgacggaaccagaacttccattcgccctccacaatgccacgttcgaagagcgggccgaggaacagaaccgcggtgaggaaaagactccgaagggtctccagcaggccgacgggccaccagccgaggagtctgacaccggcgccgagagaggaattatcctcgatgatgagccagaggacgaggacggagctcacgatacaggatcccgtgacggcgcgaatgcgggcgcgaatcacggacggggcatcgcgactgagatttggcgatgggcgggttgttgatgagagatagaatggtaacacgtagagtagtgtgaggaggacctgatgggagttagatacgagattgtgaattgtggttttttttcttttcgtgttcatcgtgttcttgttgtttctaggagttctacatacagagagaaaagcaacggtatgttctgacagggcaggttcatctggattgttagtcgagactcttttttttaggattcccccttgactcaccctgcttcgagtacagactcctcagtcgagccattatccctaccggcgccatgatctgcagagttggggaggttgctatttatggggatggatgagagaggagggagtgctttgttggtgttaccgtacggggagaggaacggtgattggctggaaataatacaatacagtaatgtactgtcaccatgcaccgtggacgtgatcatggttgttcctattgttcttttgatatcgacagtccgacgttcatattccggtatatatagtcgatctatacatagcattgaccagaatctcggtttcaggctagacgaacaccgccggtttcaagccaaacctgattcgaactggtggaccgtgcaaaaacaggatgtgagctctcacccctggaattgtctgagtcaatgcgagggatcgtggacagttattctccgattacacgagggagacatttattggcaatgagcgtctgattattgttctcggcctgcattctgcctgtcagacctggaccgacgcatagatggagtagactagtggcagttcattggcagttcatcaggatcagggacaacgcacaccggctccacttcgattctgcgattaaatgagacgagatgtttcaaggagtcagtttgtgaatggctactccgcattcaatatggatttatatatttaaacggtagcccagggagtatgagatgtaaatatcaacagacagaacggacaccagaacagacaccagaacagaacatcccaattgcaaccagtccaaccagaagaaacaaaccaattgcaacttgtacttttgatctcatccaatcgttaatagccaccagactgtcaattcaagtgcatgcagcctgcataacccctgcagtctaagatctcacttgcctagacgctcaccgctggggcaacaaaattcctcccttccaagtgtctcacgttcttcttcgacttcgtgtgcgcctctgcttttctgtcctttttgttttgaaacgttttaatgattgtttttcgaccactctctttaatggccttggatgtttgaaacgacctaattgacgacttctgcacgtctgcccacactcttttgatgaacatcagcctatagaaccaccctggatatccaagggtaccacattccttacatcggatactcgactcggaaaaacaacaacactcttttgacttgtttacacatctggtttgccaattgccctttgccgtcgactttactcaatcagtcttttcaatcaatgctctcagtgtgtccgaataatgtcttttcccgctcgctcaacctcgccccgcgcgcgaaggccattgcacgagcgtacgccctcgcactccaatgaaagatcaccaacccgctcattacgcatcgtcccggatgaagaacttgatatgtacaccgcaaccccatttccgaccaagccggagcagattctcttgccgcttcccgggaaaggccaacaacaatacatatcagacaccggtttcagctactccgatcaccacctgggatcatccacgtcgacctattcctcaccggctttcagccacccggcaccccacagcccgcgagatcactcaattggtagctgggatgtatcctccaccgtggataccggcaactcgcccccgcagttgtgggatgacgacccatcctccagcaagtcgtcgctgccaggctcggggaaagcaccagactatgggtccgagagttcagaagcggacttctcagatgatgatatgggattgccgacgaccaccccaacgataaaagccgtacgctcggagtcaactatgtcgccaaaatcttctgccgagtccgtgactggctactccagccctatagttgaacaaatcggggccccgtcaagtcccaactttgtaatgctggataactcgagcatgaacttccattcagagtcggacccgcgcacaaactcgctctcgtcgtataactcaggaggaaccgtggttcggcacgtggggtctgcaccctggttccaaaacgccttccaaccggcctcgtccgagcaatcgagctatggatccccgtcattccactccagcccacccgcgcagtctatagcctcattccactcgagtccgatcgcgcaatccattgcctcgttccgctcgtcatccagggcgccgtcgggcagccgttcccaatcagcaacatcctcttcgcgcagtctccgttccgcttctgacttgcaggctgccatcgacaatggcgtacccattcaatacccgcgtattcgcgcgccatcttcaagctcccgcaccggtgcatcgtcagaacgcgacttcacccctggccctccatccggacgttgcaatccccacttggcatcaggacgctggaacccgcacctctcaactgtctcatccatctggtccgccgatgaatcaaccaagctcgctggagaagcagacacggactcagaccgcgatatggcagcgccaaccccaccaccaccagcagccctagcgacagaaacaaccagatcctccgtctggcttgtcgacccctccaacgacagcgaagacgaacgtctcgacagcctaaccaagctcccaaaccgcccggtcttctcccaaagccaaagtctctcctccggctcaaaacgaagcgacagcacccgcagcctccaacgcccaggcacaggatcaagcacaatcctcaacatcctcccaacctgggcaaaagtctactacctccgcgaaccaatgggcctaaactcaactctctcaatgatggacgcctcccgtccgccatccatccgtccaccatcaacccgcccaccatccactcgcccaccctcctctcgtcccggaacctcaaactcaagcatcttcaacctcgtcccgggtcccctcaacgtcccacgtccccgctccccagaccgtcccctccccgatgccccgcgaagccaagaaatcacccaacgccgcgtagacagcgacccgcgcgatccacgcgcccactgggtcccgtccccgcaacccgaagacggcgagttcaccagcagccacctctaccgcctccgccacagctggtccccgcatctcgtccccgaccgacgtgtcgtccagcactcgacgagtcggtggcggccgccctccctcgactcgcgctacgagcctgtcctcggccggcgaaatatccaggtctactcattctgcctggggttcattttcccgccggcgtggtgtgtggctgcgtttctgcctctgccgcctaagccgaaggccgcgcagatggtcgagtttcactctccggatgtggggatggcgcttgaggctcagaatgtgaatctgcagcagcggaggagggataatgcgcgctggtggaggaatcttaatcggtggatgatttcgctcggggttgctatacttgttattattattgtgcttgctgttattgggactaccacgggtttttagggctatttgttccccggattggactgaactgcgttttattgcggtctttttatttacgctcttacgacttggactttcaacactggtgattacttgatgctttttttctcttctttttcttcgcggttgagctcccggacagccagtcgactggtttcttttccccttgctgttcgctatattgcagacgtcttctccttgctgtgatctcttcttgattattgacgattcagccccttcttacgttcttcttttcgcttctctgtctgcacatttgttctgaacgactccacgacttcaacgcacataaatatccttctgttttacattctctcgacgtttcaacatttgcctcggatctgtctacggctttatatgtttgttgggattctatgcatggtgacagcctttgtttacatttatgctatacgtccgtgtattggatatatgtttttgttattgtgcttttcacttcttctcttcggcattctatgtatcacaatttacttatgctatactcaacttcttcattactctttgaaagtaattgaaatcaaatcaaagctcgcaattctctaaaacccatccaatccttggaatatctatagactgatctcgaccaaccatcgctattaaacataataaagacgaaacactcctactgttctataaaaaaagagtacaccgaaacgctgatccagaccggctattcaccccgcttctaatagtcacctctcactgttagatctcaaccaaaactgctacagcctacaacttccgcccaagcttttgctcaacggcagccttcagctccgcgcctgtaggcatcttaaccgtacttccacgtctaccacgggactcgatctcagccttgatctcagcaacagcctcgtcaaagtcacgctcgggatcattcggcaggcctaggtcaggtggaagcacggtgtcggtgcttacggcgttaggacggctgcggtgcttcagttgagagacgaggtattttctgagcggggagaaggaggcgaaggcaactagggaaacggcgcagttaaggatgccgtagaagtagaggcgggaccagacggtgacggagtcgtcgaagttgaggatgataaaggggatgacggcgaaggaaagggtcagctgtgttgccagccagctgaggatgtcgtagtagggcttgtttggtgttggcttggtgccgtccggtgtgaggaagaaggggcgcacgtagcggcggaagtctattgaatggtaagttatggagggagtggattatggaggtgtattggtgcttactctttgccgcggtctggataaacgagcccagtataaaggtcatgtagtatcctgggtggaaaccgtgccagagggcgctggtggcgaaggtagccaggctagcgcggaagcccggtttcttgcccttcggcgtaacgcggaggtagacgtagttgcgcagccagtggttggtgttcttgttccagttggctaggtaagcatgggaattctgtgccgtttccatcgcccacggatcgacattctgcagtcgattccagaagaccttgcctgttttcgggtcgaagctgttgtatcccatgccggatagaatacaggcaccctcagtcagagcccagacgccgtaatacttggtgcgagcggtgaaacccagcatgaagacagtgaaaacgcgacgcaggaaggaatactgcaagaaggcgtctgaaagcacaaagtcggtggtgaagtatgagctcagttggatgaaggcgaagatccagaccaacccggcggcggccttcagtgcagcaggtcttccgctgcgagggatcttacgcttcttccgggtagctggcaccttggatgggtcagtgcctggcggaacttcaaagagcgtagtgtcgatccaacggcgataatccacgtattcaaaggaaggaccggcaaagagagaagggaagaacaagacatagcccagatagtctacaatacccgggaatttcgtaatagcagagtacttctgcgaatccgagagttggtccttgggcagacggccgtcatgaatgttccagcagaatgagctaagtttcatgaccatgaccatctgcgctccagtaatgtcaacggccgatttgtcgttcgccctctgacgatcgatatggttaatcgacatgtggcccatcaggaaaaggaacccaatccacggcatcagtgatccatccacgtagtaggcgattgcataggtagccgcggcactgtatagtaaggtgcgtagaccatcccagaggtcgaagagtccgataatatagaacaacgaaacggcgataatgaagacattcttcttccagggttggccatcggggatacgtttgaggagggcggccagtgggtaggagaggaggaacgagccgatcagcttgactggagctgggggtcagcaattgctagcaattcgggagcttatggaaatggaagatcgtacgctcatcagttgatgcgccagtgagtttagctggcacctcaaatactgcggggagaagtgttagttagaccgagcttcccaagtttgaatgagggttgacatactctgatctacatagggcaacattgttgaccatgtagaagatgaaagaacagacaaaacagacaaaaaagaaagaagaagtcaaaaagaagatcagagcagtgaagaaaggaagaagaagccaaaaagaaggaaaagaaaacagctcgtcatgtggaaagtggaattccccccaacaagtttccgccctctccacattcagcccctcgatcttcaacagcttgaacagcctcaatcaggagctaatagccactttgaaaaaacttatttcctggtgaaatctccccaccatggacgtcgtcgcggctgcctcggggtacatctccaagatggtcaccgtgggtgagtccggaacctcgtcatccaagatgaagatcttgcttctggatagtgagacagtgggtggatttaccctggcaatatactgatctgattgctaacctaacccctatgggtataggtccctattgtttcgaccgcaatcacccaatccgcccttctaaaccacgaggtctacctcattgaccgcttggacaatgccgcgcgcgagaagatgcgacatctacgatgcctatgcttcgtacgcccatcacccacctctattcaatttttgatcgacgagctgcgagaacctaaatacggcgaatattatatctaccttagcaacatcatccgcaaatccgccctggagcggctggcagaagcggacagtcacgaggtcgtccagtcggtccaggaacagtttgccgacttcctcgttatcaacccggacctttgctctttgggcttaggtttcccattgcaacggatatggagccattcgccggatttatggaacccagattcgttacaaagagctaccgagggggtcctggccctgctcctcgcgttgaagaagaatccgcttattcgctatgagaagaacagcctactggcccggaaattggctacggaggtccgataccacatcacgcaggaggagcagctatttaacttccgccggaccgatacacctcctatcctgcttgttcttgaccgccgcgatgatcctatcaccccgttgctgactcagtggacatatcaggccatggtacatgagatgcttggcatcaacaacggccgggtggatctgcacgatgtgccagatatccgaccggaactgaaagagattgtcttggctcaggaccaggaccccttcttcaagaagaatatgtatcagaactttggtgatctgggccagaacattaaagaatatgtggagcagtaccaaaccaaaactcaaagcaccgcgaatatcgagtccattgcggacatgaagcgttttgtggaggattatcccgaattccgcaagctggcaggtaatgtgagcaagcacgttaccctggtgggtgaactcagtcggcgcgtcggtgaagataccctcctcgatgtgagcgagttggagcagagcctggcatgcaatgataaccactccaatgatcttagggtatgttcaatagttaaactgattatgctttgctcacggactcacccttcttctccagtcactacaacgaatcatcgggcagcctaatgtgccctcagataataagttgcgcctggtggctctctatgcccttcgctatgagaagcaacccaacaacgcgctaccaattctccttgatctcctcgccacagcgggcgaagtctcaccaaaccgcgtaaatattatccccaagctcctcacctatcaccactccctccaagccccaccagtcgcaggcgggttctctgacctcttcgaatcaacctccttcttctccggcgcaagcaaccggttcaagggtcttaaaggcgtcgagaacgtctacacacaacactcccccagactagaagtgactctacaaaacctcatcaaaggccgcctgaaagaactgcaataccctttcctcgagggcagtggacacacgcgggacaaaccgcaagacatcatcatctttatggttggtggcaccacgtacgaggaggcgaagatggtagcgcaagtcaatgccagttccccgggtgtgcgagtcgttcttggtggtacttctattcataacagtacaaccttcatggaagaggttgatgatgcagtgggcagctggccagaaccaggaccttcgacagctgcgggacggctgcgacgggaggttggacgataattgtgttttatttctggtgtatatgggtaatgggatagaagtatatcaagtaaagcctgcaatgacagtcaatttcatcaaatctagaaaaggaaatagttaacggcaacttatttcggatttgtcgctataccgcgccgtagggacagaaaccccaaatgcggagattcatcttcctctttctcccctcacctgagccacaccatggagcagacatccccaaaaggaggtccctcctctccagcatcacgcgaaccaagacttcatctcccttcaacaaccgatcccccgggtccccagaaccccgccaaaccgctcgtatggctggtatacaacccctccctaagcaaaaaccccaagaaacactaacacacccccagatcttcggcgcaaccggccacatgggccgctccctagtaaaaaccgccctcgccaacaatgacctagtagcagccgtcggacgcacctacgagaacagccccgcagcaatgaaagagctagaatcagccaactgcatcggactcctatgcgacgtacgagcgcgagagaccgtcaagcgcgtaattgaccaaacaataacccgcttcggccgaattgacataatcgcaaactgctccggctacggcgtcatcggcgcctgcgaagaccaagatgaattcgacatccgcaaccagttcgaaacaaacttcacaggaaccctgaacatgatccagctctcgctaccgcatttccgtcagcgtcgcgcggggagatacctcattttcagctcgacgtctggcgcgctcggtgtgccgggcctcggaccatactgtgcatccaaatacgccgtcgagggcttgatggagagtatgctgtatgaggtggatagttttaatattaagggtacgctcgttgagcctggtcatatgcgtcgtgatgatattggggatttggtttcgccatctgcggtcgtgcctaacccttctgaacatcagctttcgtcgcccttgccgctctacggccattttctggttaagccgcccagtgagccgtataatacggttacgtcgccggcggcgcatgcgcgacgtatgctcatgtggctgggcgataagcagcctgctagtgcggtaaaggcggcgcatttggtttggcagcttggtcattgctcttacccgcctctgaggctgattctgggtacgtatgctgttgagagtatacgggatcggttgaagtgtattattgaggagattgaggattggaaatatctcagtttcccgatgggtgagactttgccggttggagggcgtgggggatcttcttttccggagggagctgaaggggggagcgaattgggtaatggataattttgttcgactttgtcaacgtcttctattatacccaaccctgatcaaggagcctcttcggaggacagccgacctgcattctccggcgtggggtttcctatgtcgtgggaatgcatgacccgctacagagcttgtctggattctatcagaacaagagacttgctatatacctacggatgtcgaggattaaggagcaaatgatatgcgtctacgtatactgcatggatgctgcacaccacgaaaaagtgctgctttcttggtaaacccaaacctatagctccagaattgctctctgcttcggccaacgttactagcgcggaggcagacaaccaggctaatgggaaagaaacccaaaggcattcactccactaaacagactcttcgcggggagccagtcggtgatttcttgaatttctgagatttcaccggctcgtgcaaatgaaccaccagggcgagtaggcggatactggcggttgatgcgaggagagtcactctagcaaattcatatagatatcgtgtatccagtaaaccatctcggccagcgcagtatcccgagctaggacggcctcatttgcgagttacggtccaagtagttgcaaactagcataatcctgaattgaggtcgttatgatcggctcagacaggcttgtaattatatctctcaaggctggaaggatcattctagagtgtgcattgggaatttccttcctggtcgatgcacggaggactcgaatgtggtactcttgtggataatgtgaaagaagtaatctgttgatgttagagtggctcttatgaaccatggcctgcgaaggagctagtactttgccattttggtggctttcagaaccactccatgagcacggcgctcataacctctcggttctaggaggctcatgggttgtgttcatatataatagtgatgacatcgtctaggaaatcctcttcttataaagtctaaacctttgtaggaataatgatggtaagagaaatatatgaagagggaaaagaggaagatgccatttatagccatttatagccacacaaggcatgatatctcaggcgttcggcataacctcctgtaaaagaaagagaaacaaagggagaagagaaagctttatgcaatacctatcaaaataatatacaagtctatccaagatagaaatagtaatacaaatcccacatcttataccaaggtatagggaactcagaaaacgacattgacaagtttaccccccttgatgacaataacccgccgtctcttctcccagtcattcttctcccgaagccacaacttcccctcagaagtctctaacactcgactgatgatccaatcctgttcttcctgcgaaggagaattcttgccctgcggcgatgctgtcaccggagactccatacgcggaatggtcacagcacagcggagcttgccgttgacctggacggcgaccgtttggccgccgcgagaggagagggtttcgacttggtcgggtgtgaggagggtgctaggccagggggatgaaaggatggatggcactggtgttgaggaggtggtatttgtgcttgcgtgtaggacttcccatgattcagaggctaaggctggggcaatgggggctagtagacggaggagtgatgagacagataggtataggatcagaggggaggaggcgggtgtcgaggccagggtgttggtcagcttgattaggtctgagatgactgtgttcagactgtaggggttgctttcgatgcaagtggtgacggatgcgatggtgttttgggtggctaggacggcgcctgcatcggagtcactcaggtcctggagtgatgacggaaggggggcggcatgggtggtagatgatttcagatctgcttctgagacggagaatgatgcctccgttagagtctgctgggtgtcttggacgagtttccagagtcgaccgaaccagcgctcgacgccgacgaccttggcttcatcccattctagaacctcgctgactggtgcggagaacaggatgtgcgcgcgagtagcgtcggcaccatattttgatgttgtgctggtaggatccacgccattgtacttgctcttggacatcttttcgaaggagatattaggggaagcttgtgttccctttatcaaaggcttgtctggattggtcaggtcaacttccgacgggagaaggaagcggcctgtcgaaggctcagtgaaggtctttccatggaccataccctggctgagaagcattttgaatggttccgcgggtgcagcagagtccctcgttgggagcagctcagacgagaggaatttgtaaatgaaccgagcgtagagaagatgcagaatggcatgctcgataccaccgatatacacatccactggccgcatcaccgcaggagagaacggggcttccttattagcatagtccaagaatcgcaagaagtaccaggacgagtccacgaaggtgtccatggtatctgtgtcacgtcgagcgggaccattacaactggggcattttgtatggacccattcatctgaggattccagagggtttcccttctttcccttgagccactctccctcgattttcggcagcttcactggaagatccttgtcgggcaccggcacaggaccacagtcaccgcagtggatgatagggatgggcgcaccccagtatcgctggcgactgatcaaccaatctcgcagacgccagctctcaacgaacccagcctgaccgacttgctccaggtcattgacaatcagttttgatgcctccttggagtgtaacccttggtactttccgcagagcgaattcaatacaccctcttgcgtgaaagcttttgtgtctgacgtcgggacgacgctgcttgcttcattgccacttggctcagcctcgataacaacagggatcgaatcggggttcacattctccttaaagaacatcatgtccctgttatcatggcccggaacgcccatgactgctccctcgccatagtcgttaaggacgtaaggagccacaaagacaggaagcttcctcagcaagtggggtgtttctgtatcaattttgcacaatggatgagacacctcaatgtcgggcagccggtatcctgctttggagtccggtgcaagcgacaaggaatcgctcaggaatttgcgaagtgcctcgtctttctcggcagccttcaacacaatagggtggtttaaagaaagtgctagatactccacaccatacaaagtgtctggtcgggtagtgaatacattcacatcgatttggtcacctccaccgatcgtcacagggaatgtgaccttggcaccgtaagactttccgagccaattgcgttgcatcgacaggacacgctccggccatcccccggcaagagaatcgaggtctttcagaagtgcttctttgaaatcagtgatcttgaagaaccactgcttcaggttcaacttctcaaccttagcgccagatctccacgagaatccattggcatcaacctggacgagaattagcgcaaatcaagttttgccctttgatcccgactcacctgctcatttgccaaaacggtcttatcaacagggtcataattaaccaacgcttctgcttgatacgccaaacccttctgatacaacatcaaaaagatgcgctgagtatgctcatagaagtccggtgaacacgtagccagttcctaagccacaagtatcaattagttatcttagcggccgaatcaatacttcacataaacatacccgatcccaatcaaaatccgccgaaatgcacctcaactgctccttcatctttgagatattctcctgcgtccacaccgcaggatcaatacccctctcaatcgccgcattctccgccggcagcccaaatgcatcccaccccataggatggagcacgtcatgtccgcacattttataaaaccgcgagatcacatccgagatcgtgtaaacgcgcaggtggcccatgtgcagcgtgccagacgggtatgggaacatggacaggatgtaggatttaggtttctgtgttgtgtcgggtgttgagcgcggcgtggcgcgctcgctttcccattttgcttgccattttttgtcaagggctgggaggtccagtcggcgggttgctgtgctggctaatcgggtaagtgtgtagactggtgagagggctcgtagggttgggcgcgtgtgaatgcggccaggcgcgacggcgctggttaatcggagtcgtgagagggattgcatggctagttggtcattatgtgtctaagatatgcttagatattggggtaattggcgcgattggtcatgtccgcgatttgaacgcctgacttgtctgcggatcttcaaaacttccccggagcccggatagctttagccccgatttggactagcgtatcaacgctattccagaagccctagatatgaagatgtcgagtcttttgtacttgcagggaattaatatttgggaatgtatttatgttcaatgaatatgcatatcctgcgtcgcaactctctatatattgtacactctactctatactaagtctacattctcaaaatatcaccactcctatcaatgccaccccggaaatgatccgcaatcactttccctccgagaatagtctcctcgacaagcccctccacatgcttgggctcaatacgaccgtaccaaatccccttacccgccagcgggtgtggctccgaagaagttcccactatcatcttcggtggtatataaataatcacattgcctgcgtatttgtgtcctccaacatgactgatcagaccaatattagcgtgcttagggccatccaccgtagtcccatcactgtctgcggaagtgaatcctcgcgcttgcaacacgcgcttgaactcgctttccaacgcgggggccatgagaccacagcgcatgtcgcgacctccgtgtccacatattaacactgttggagagtgattgatatcgataacgcctgggaagtgtgatgctagctccggggatcgggtcatttgtgcttgtttggttgcggagagagaggagtgcatgttgtggagtcgttcagggagaagatatgcgcgcacgaaggtcgtaaggtcggttgtttggtcgggcgatgaggttgtgttcacgggtattgagggaatgtatttgaagctggggaagaggaacaccgaggcagaggtggaggaggatcctgcagctggtgtgatagatgaatttgtgaccaagatattgttgaaaggctaaagcgatatgatcctgtataagcaagagcttgcgcattcattgggttagttgaaccacttacatcaagatatggcccgccacgacctagcaggctcttcaatcctctcacaaggttaccccagcctttgttttccccatcattctcaatgcgactcgtccagtctggctgtcccgtgcagacgagaagctgctgcgcgtaggcagccatcgtcccatttaaggcttgttcataatcaatcggtagatcctccggtagagcgggcgtgggcggacaattgcagcttggttcggggcatgtcttggtaatggggaagggaggggggatttctaggcgggcgcggagtctgctactgcgctgaggggtagacagtagacggattgtctggcagtttcgataggttcgcccgctccagtcgcgcttgagcgattgcacaagtattggtcgcattataatagatagaatgtatacaatttcaaagaacaaaagtcagaaaatagaaagaaatagatttgaatgtccgagcgccgagtccgagaaatcggagattcggagattatcaatcgccgccgctgattcgttgatctgcgcagattatgctgattacgtcataatacaatcctaacaatcgcaatgttcccaatcatcctcatcatcactgtcaatcaggatcccttggacaaatcgaccgacaacctgcaagaagtctcgcgtttgaggcacatcatgagtcccacagaatttgtaaatctcgacattaacgcaatcctttgctaacgacaaggaccgggatggatcaactactgcatctaaagatcctatgacatggagtattggttctgatcttggggtaatatatcggcgcatacgcagggtgtgctagctgaaaactgcttggcaaatagcaaactcgatcggggggtgatctagaaaatggaaatcataagtcacttacaaatagcggcgaagacccgggagtgcttactgtgagattgaagttgcagattgatactttcttttcaagaaggtatatgacaatagcagccacggcggcgcctgatgagaatcctttggtcccgataaaaggtccatgtctctcaagaatatcagaggcacgttgaatggactcttcaagagctttgatgtctctggatctccatcaccccaggcctgcttgtcgtctttgtgccatttttctggatcggctcgcagttgacctaaagggtaaaaaaattcaatgttgcttatttggcgattatggtcctgctgcagggttttgagcacggattgctccatatattgtcgtatgaatctagttttgcattagaaaaactgtccagaatggctgtgccctaaattgcatgggtaaactggctgcttggcttctacgggaaagacagaaggacagcgctctcaccatgcaacatgaggattttaccacatgatggggtctgatcgaataatatagttgagttcatagtgatagttcccagtattaaagggttcggcgatattctctcgagtgtttagatgttctttaatggggactctttgaaattaaaatatatattccaaagccaaatgcatatacgaaaggtaacacatagtctattgtgcaatgtaggtcgacatcaagtgcatggcgatgcttcttgtgttaacactatgcaatcaatgataggttcatcaaagttgtaatgttagataaagtccatttgcagcaaaactcgacagataatgtctgcatatttcccttctcagacaaatcattaatcatatgagccctatgttgcacaggaaatgtagactggatgtcattttgttaagatcgacacgcgggtatacaatgtacatcaatctttacatcatttgaaatatgaaaacacatccctggaatgcatcttcgtttctactattcattttcaaaatggttcaagccgatggaaggacttctgtcatttcttagcatccgataccgctaggcagctggtaatgactgaatgtgcgccgtatctactcgtgcaagcaagcctcccggtgtccccgctgcctggaatgatcccaaatctgaatttatcaagatgaagttctgtggcaagggtttgcaggttctgtctcttggactgtcagttatgaaaataggtgtattgtaagtgtgccgaatgagggacatggtattcctgcagttcaacctcgggactgtcgcgcgctatggctgacaaaagcactgatgccgtgcgagatagtcggcacatacatgcctgcgctcatcttggcacgcttgtcagattaatgaaaaaagacgcgctctcttgagtagtgcagagcgcaattattgtgtgcgtatatattggttattttgtcgaaggcgagtatgattgaggcggggaatatgtgagctcgacctattggtatgatccacgtgttgaggtccaggatgaagtgtgcgggaaatgggcttgcgattacttctcatggacggcgaaattctggacgaggtctttgtggaggaggcagttcgtcagttagtggatctttttgtccggatctaactgtgggtgtgttgaataaaacaggtgtcaatagatggttgtgcatgtacaatgttcgaggctttaaagactgtaactgtccgattttggaaggaaatcacatcacgattccatattgctggcgatagcacacggaggttgaggcgcatcccggaagttcgagggtgacgaatcgaactgaatggcccccgcactgatcatgcgataatacgatatgcgccgaagccccggaccatcgtctcacgtatgcgacttgtaacgaaatccatggcgactatgcagattaactgaatgatcaagatttgagtaggtaatttttgggatcggtggtgggttgcaacggtagttagcatatcgtacggcatcacgattctctggtcatcatttcaaagttcggttttcgacaacgtagcaatgcgatccactgcccgatcggggagcaactcgaaacatattgtgcttatcccaattaatttgcagtcctgtcaaagagaccaagtgcgctgcgaaaagatagatgaatccagtcttcgacctagataaggggaattaagaaatccacccatgctcgagtccgtctatgatgcggtcatgctttctgtgatctccatgatctgatccggaagctcatcggtggatctggtgcggatccatggatatttctccaaaacctcctcgcgaggaggcaatgtacattatgggtagctctgtaggggagtagcggggccggagttggagaaggtgacagggaggccgaatatcggcagaagtgcgggaattgttcggcatggctcctgaggaggatgccatcgagtgctggggaacttggagtgttttagtaccttgtgggatagtatttacaggagcctgcaggttggagatgctaattattgggggtcgactggtgtacggagtatctgagttgcgtatacgaaattggttgggtttgactttacccctcattatgtcagcagatatagttactcctcagcggggtaacgctcggatttctgatcggctgatgggctgatgggggagagatgggaagaaccaaatagttagtgatatggaatactacgatgaagatagagagagatattacgaggcatctgatccactacgagtgcgtcagttgtatgtgtaactgtatactacaaaagtgcccccgcacgttcacccattgagagctttccaagggttaagttatgcaatagtccatgggtgatagcatagcatataaaagtagaatatacacacatgcacatatataatatgcgatatgcaatatgcaatatacataatacctatacaagtggatatggcaagctacgcaagtccgaaaatgataggccatgaattcaaatcaatgtactccgtcctacattctgtcctctgtccctcgtgcggagagttctccaagtggattcgctcccagtttagtccgactctcccgtttctatgcgacttattctgaggggacaatgcttgtctttgtagcgagggggatatataacctagctccagttgctgttcggatgctttctttcttctcactctatccaactctcatctcttcaactctacctgtaagtctatcctttaccatcttcctattccactatttcccttatagtcacatcacattccctgggttgcaagattccccacttctccccttcagagcttgcaaccggttttctccaacgctgtttttggacgctgacctcatcaactatttataactatcgatctatacacgaatgtatataacggagcgctaaccttctttttagtgatattttgaatatatcttataaatattttatatttcttcacgatggtatttactcgctctcttacccgtcaattaggacggcccttcctctcgagctctctcaagccaactgttgcctccagttccttcgctcgggcttcaccgttggctggctatatttccggtgcacgtacactaaccgcaacttcaaacctccagggcaaagttcttttggttctttacgatgtaggtcattctcacttcatacttcctatacttcaatcgctgacccggtcttgtttgtgatatagggtggtattcactcccagcagcagcctcagctgctcggtactaccgagaatgagctcggcatccgcaagtggcttgaggaccagggtcacaccctagtgaccacctccgacaaggatggcgagaactccactttcgacaaggagctcgtcgatgctgaagtcatcatcaccactccgttcgtttctgatgtgcattattttaaaaacctccactgattatataacagcttccacccaggttacctcaccgctgagcgtctggccaaggccaagaagctcaagctcgccgtcactgccggtattggttccgatcacgttgacctgaacgctgccaacaccaccaacggcggtatcaccgtcgccgaggtcaccggatctaacgtcgtctctgtcgctgagcacgttatcatgaccatcctgatcttggtccgcaacttcgtccctgcccacgagcagatcaaggccggcgactggaacgtcgctgccgtcgccaagaacgagttcgatcttgagaacaaggtcgtcggtaccgtcgccgtcggccgtatcggtgagcgtgtcctccgccgcctcaaggccttcgactgcaaggagctcctgtactacgactaccagcccctctcccccgagaccgagaaggagatcggctgccgtcgcgtcgacgatctcgaggagatgctcgcccagtgtgacgttgtcaccattaactgccccctgcacgagaagacccgcggtctcttcaacaaggagctcatctccaagatgaagcccggtgcttggctcgtcaacaccgctcgcggtgctatcgttgtcaaggaggatgtcgctgaggccctcaagtctggtcacctccgtggttatggtggtgatgtctggttcccccagcccgcccccaaggaccaccctctccgctacgccgagcacccctggggtggcggcaatgccatggttccccacatgtccggtacctccatcgatgctcaggtccgctacgccgaaggtaccaagaacattctcgaaagctacttctccggccgtgaggactaccgccctcaggacttgattgttcacaagggtgcctatgccaccaaggcttacggtcagcgcaagtagagagccctgtgtgattaagtatgaagtattctccgggtgagagacttcgtttcatatttcttgttctttattcgagatgttcataaaagtcccaattgctcccgatggcatgggcaatactgaaaataggtagcatctttcacgataccaatgaataccatttccaagctttccttgttttgcacttgtctttgaaatttcttacccaatatgtaatcgcgaacaggttgtttctttttttggacgacgttgcttacttcgccgtgcaaaaagcatgggaccgagacacgggtgtcactcctccatgaccagtcgcgtgacaacaccctggcataagagtgtccaagctccttatatggaggaccagggaggcacagagagtcaccgaggcctccctttggttccacccaggttcctttcatcttaactttatgttgaggtggttactgactctctgttgcctacagtctgacgtttggagttgctgggcccttcggcgctaacggtgcccgcgattgttgcgagcaccgaccgcccgggcactgccagcgtatgactaagcagccgaacatgtggctcagtcagtctaactaacgccacggaacacccacgcctcaaaacttacataaaccactcccgctcaaacattcgaccacgtcccctcacttctccactttctactccacactacggaggcctccagccgccatgggtgacttaattactattggtcaatattgcctggcagaaaatcagtcatacactcaacttgattcctcggatcgacccccctaccattatactctttatcattaactgctttataataaattgctttatcaactgctttcattaaatcaaggagttatagggatcagataaaacatacgaatttttctaattaaaatgcatgtttatttctatacaatttcaaactactccgtagaatgaatgtatgtagtggtagaacatatggcagaatttcgtattgtacctgattaggaaagcggtagctggacttctaggtatttcaaggtacccggttcttactaagtaacctaatccccattcgggtattaggttattacggactaattaggaaggcggtactaaaacaactcaggtataggggtataagtaacaatcccctaaattaattctatcaccaccaataatagagatagtttaattcttcatgttgacaattatcatctacgaagtatgcgtgtatcaattaaagaaggcggagagaaaagcggtaaagcagttttgaccaatagtaatttagtcacccatggctatatctacctccaatcatcctaaaatgcctgtcagaatccctcaatatttttcttgttttagccccgctgctcgccgttgggtacccgtggcctcacggcccatccagagtcccggggtgcaaagctcagcccaaggaaacactcctagatctcatttcaacatagtctcttggaacattgactactccagtagctatcccacacgacgctgccttgatctcatcaaccacgttttcaaatatggagttcctgacattctctgcctgcaagaggtcaggtccgaagttcgtgccagtctcttaggcaaccgcgaaatacgccaagctttcctcacgacagacgccgcgacggacctagagtacaagcgtttcataaccatgaccctgctgtctaaagaacgcttcgcgtatagcctagactcgaaggagatgggtggatcaaacgatgaggggaagttcattgtcgggccggtttttcgcgagcacctcccgagtgcagccggtagggatggactttgcgtggacctcatccctccttgcgcaccggacaccttcctccgaatcataaacgcacacctcgagtcgtgcgatggcttctcctaccgcgctgcgcagctcaagcaactttctagcgtccttcacgaacctggctgcagtggtggcctcattgtgggcgatttcaattcggtcactgatgacgatcgcctgcttatcgaggagaacaagctaaaggatgcatggctgacgttgcacggcgatacgaagccagatgcacctacgtggagtgtggggaggaggagggaccctaggtacgagcctagcaggctggataaggttgctatggtaggattggaagcggagatgatggagcttatgcatcctctctgcatcaacgccaccaagccgtctgaccagattgagtggagtgaccacagtggactgaggtgtaagttttgcgtctaaatgtcgttgagcaagatggagatacaatctgcccacgaccgtgaggactccatgaagggaatccgtgacttcgatgacattatgtccctcataaatgccggcgacaatgtccaatatactcccaaggaaagagagaagtacaagagagcctttggggaattcgtcgagacctacattgagcagaaccccaagtggaccctcgctcagtggaagaagaacaccaatcttgagtaaggattcgatggcacactcattgtaactccgtcttcctgggtacgtcttaatgattcagtgcatctatttttctcggatatcggatggccttacgccccattatatcgctagcaacaaatcccaaacatccgtccataccattcttaacatttccttggctctatcgtgactttcctacgcctccctgatccggcttgagcttacatggaagcaatgaattcactggttgtggccgtgtccgtctgatattgcctcccttgagtgaatcaactcgatacttcagtggatgctgagccagtagagaccgtgattcttgacacactgtgcagataacgagaaagaaaaaggttgaaatgttcttattaaaaagctcaccgaaaaaagaacgcgataatgcgcctcaccatccttcaaaaggctgggaccaagacaagtagcatccacgtgagggggaactgtcgtctctgcgagcatccaatcagctttattcaattcctctgaaagtgaaccagcacagagtcctggttatgcattcgagtcacagcatcccttcgctcatgaatagaaagcagaggcaccatgctctcggagtcctcgatctgctccggtgtacgttgctggtctttaggagaggctaccatgatgcctgaggatagatgccttgagaaataatctcaataatttcttgcatgagtcaggttaataagcggcaaccctaagggggttttcgcttgagcgaaaataactacaacatcgtatgttatgatatgcagagcatgaggatcggtggagctatgtcgatctcaccggattaattgagtccagcccttcggtggagtctagaacgtgtacggagtagagccgatgtctttttttagacattcttgatggccaagtatgattggtagcagtagggtctaaatatgtatatgctatcaatctataactacatacaagtacaaaaaaggacaaaataactctattcacaaactcgccacgcttgaaacaccaaacctgtgagcccagatcatacaggcctgcaaaacatccatagacaaaagctccaaccccaagaatgcagatatgtatatgtgaacgtgatcttcaacgtttcaaagcctccctgcccgtacattcccatgcccctcactcccctcctcatcactatcatctataaacccctcctctaaatcccgacttaaacgactatccgtctcagccccggtatcacgtctctgttgctccagcgcaccccgcctcatagaatccctatccatcccaaccaagatctccccttcctcgtcgtcaatactgatcgtatcgtggtcggctacatgcgcgccccaccgccaccgagagggaaggaagaagtgcatcactttatcggctatgcggtcgcgtagggatagtgtatgtgcggatatagtatgtagtgggagatattgcgagtagcgctggtggtagcggcggaagaaggggattatgacgcatgaggctaggatgtagattgataatgcaattgcggctgggatgaggattgtctgtatgtgggttggtttgtcagctttgtgttcttttaggtcttggtcctagtcttcactcttggtcacggagtaacggtgatgtgtggcttgcgcgtcggaatagggggttttgtacacaccttggcaaagacactggttgatcccatgctggatgctgggaattgggcttcaaagcgcacctcagagtcgatgatagagtggtgaggtttgagggttccaaggtttgcgcgagagattgcggagcgaggtccacgcggcaggatcggcagatcgacaaacgaacggccattcgggatatcagagatgtcacttttgttgatattttttgatatatcacatcattaccttattcaaatagtatctgcttcgtagaactagactacctgtatgtaactaataatagtacataaaggctaactaatgatagtagtatataaagacactcttaatgacaacatatagttagttatgaacatctatgccgatgagtttacctatctaataggtagtctgagtctcatataacatgttctcttagctcattcactgttcattcccagatctcctttacgagcctatcattctttctagtatacgtacgcatttgctagcaggcgccaacgggctcgtagtgttcatagcttttaatatggttaaaaatagccaccccagctggttagcgctattatctatactaccagactaacatataaagatcgtaggctcacatgggtcctacactaccggacttaaaaagccattcaagttacctccactctctcttttactccgaacaaagaaggagtgtaaaagaaccggctatgtctgaggtaggtgccaaatgaagatgtatatcaggaatagatatagtaaatagtgagggacttgttctagttagcttacaggatgaactatggacatgcccgaagtagtttagtggcagagtatgtacctatcttctgcgagactacacacttactgatcttcatatgatgctgacatatggctggtattatggcttagtatccacgctcaaccaacactgaggtattttctctttgaagctccgttcattccggtccagtggacgtcgaccttggaagggtccaagtataagcttacgtgatcttgataatcacgtgcacggtcggggagtttctccgggaagccccctaatatcaatggaacgattagaagaacgctcgggcttcgatcctggcgtcaaactggacttgacatttgcaaaaagcttgcatgttcatctccttctctcctattttgctttctttgtggggtacgtgccgtgaaggaagccccttacccctcagtctctcgcgcctccgttgtcgcaatccgggtatactaactagcactagccagggagggacaaaacagagagtaacagagagccactttcgcccactttgaatgtcatcatcttctccgatatcccttgcgatcgacagcgccttatcgcgaaatagggcatccctatttaataccgttcctgagagtgttggaggggcccttatgctgcgccctgcctcatcttattgacgcccgccaaaatgcccaccagttcacaagccgacaaacctaagcagacatcgagtggaaagtcgttcttcggacgaaagttgtacaaagagaaaccgaccgaggaacgatatgatagttatggagctccctacgatggcctggcacctccgggaagcgcgggctcacgctcgtcccgccattcgaagcggtcttcgattcaatctgtcgacatgacccaggatttcgacccaagcaatatcgcacacacctcaggcgtcatcacctccatcccctttgaaagcctccccaccgataccaggaccccaattccaatcgataacatgtctcgccctagctcatcgcgccacgagccttcccccaaccatctgggcaaagctggaaatgactatcatcaatatcccaccgtgacctctacctctgcgccaaatgggtacgtcccatatcctggacctcgtgcgcacccgcacatctcgaataacaccagctaccccggcagcaaccccggcgagcgaggtgccagacaacaacagcagcagcagcaacaacaacaatatcagcagcagcaacaatatcagcagcagcagcagcagcagcagcagcagcagcagcagcaacaatggggacggccaggcagctcatcagcgaacaatgggcctaaccataactcctattctattgattcgtcctctaactcccgcacctccctcgaccaagccagcatctattcctccgtttcttctaacacgcgcggttcaagctacttctcctcggacaattcctctcgcactctcacaacctcgcattctagtgaccgtcccgccttgtttcccagttccagctcgggccgtttgtcaaatgcgggatcctcccaccagatatctgtaccggccgctatcccccggccacaagataactacctgactcgaccgagagatgaccgcattgtggatcagctctttctagagctgatgcagaagcgaggatggcaaaatcttcctgaacaggctaaacgacagatgttgtcgtaccctgcttcaaagaaatggacattggtgcatcaggatcgcttgacagagttgcaaggagagcaaaaaagacggcaaaatgcgcgacaaactcacggccatgacggcatgtctggtttgcttgaacgtgctgatgaagaagggagcccggaatggtatgtgaagaaggtgatggatgacaccattacgtccaagcagcttgctagtttgagtgtcagcttgcggacacagccaatcaggtatgcaatacccccttttctccatatcgtgcgtatcactaataactaaacagctgggtgaaagcctttgttgaagcccaaggccaaatcgctttgaccaatgtcctcttgaagatcaacagaagaaaagtctctggtcctgtcccggctccccctacaggcgataaagatctagaccgagaatatgatattgctaaatgtttgaaaggtctgatgaacaacaagtatggcgcagacgatgccctagagcatcaaaatgtgctagttgcactcgttagctcgttatcatcgccgcgcctcaatactcggaaacttgtcagcgaagtcctcactttcttgtgccactggggtgatggacaaggccacctaaaagttctacaatcaatggacaaggtcaaacatgatcacaatgagaccggtcgcttcgatgcttggatgcgtattgtcgaggtcaccatcgacggccgtggaaagatgggaagtttggtcggtgccagcgaagagtaccgcagcggaggaattggcatggagaacctcctcatggagtatgcagtctcaaccatgatccttatcaatatgctggtggacggagcagaaacggacctgcagctccgttgccatatccgcgcccaattcacatcatgtggaatcaagcgtctgttgacgaagatggagggattccagtatgaggttatcgacaagcaaatcgaacgtttccgcgataatgaggccatcgactacgaggaccttctccagcgggagggcagcagcatgaaggatagcatcgaaggcgaagttaaggatatgagcgatcctatgcaaatcgtcgatgcaatcacgtccaagatcaacggcagccgatcccatgactacttcctctcggctatgcagcatatgcttctcatccgggagaactccggtgaggaagggctccgtatgttccagctcgtagacgccatgctgagctatgtggccatggaccggaggctgcccgaccttgatcttcggcagggcctgaccttcaccgtgcagagtctgctagatcggctgcacacggatgctgaggcaaggcgcgtttatgacgagtctcttgaggctcggcaaatcgccgaggctgccattgctgagcgcgacgagatgcgagcgcagatcgagctcggtgcagaaggcttggttttgaaattgcaaaagcaaatcgatgaacaggctggtattatcgaactgcaacaaaggcaaaatgaatcgttcaaggccgaggttgcagaaatacaaaggctgcgtgctcaggaattgcaacgcaatgagctagaaacccgagaactatacctcatgctccgagatgcccaggatatcgccgcttccaatgcccgaaagaccaacaaccatgatatggcagaggcggcagatccatcccagatgcccggtatcatggaccgcgaacgactcatggaacgtctagaacgccagcttgagcggacaaagacccagtttaagctggagggcaaggtctggggccagcatggaccatcagatcgactccgcgagctgcgcgagaagatggaaggtgaagtagatgacagtgagtactttgctgagtctacccgccgacacctcgaccctggagctttgggatctgtttaccgcaagcgcagccatatccctacgatggactcgactttggaagccgaggaggacatcccactagatagcaatggcgaaccgatgtatgagaggcctcgtctggtggaaatgcatcgtcctcgtttgaacgctgcccagactaccggcttcctaggcgagcttgcttccaaggttcccaggtttgaggctgaagatcccgatgttgttgaaggggaacaggtacccaagctagaagataatgaagctgctacaaaggctatgccacctcctcctcctccagggggcaatattgttcccccgcctccgccgccgccgggagttatagctcttaccccacccccgccgccaggaggcaagattcttccccctccacctccaccagggggcttctctctcccacctccacctccgccagggggctttactcttccaccgccgcctcccccgggtggaaaaattggtctacctcctcctccaccgcctggcggaatggctctcccgccgccccctccgccaggtggtgccaagggtgttcctggattgccgcctccacctccgccccccggcggaagagttggcgtgcctccgccgccgccccccggtggtggtggtttcgctcttccaccacctccccctgttcctggagccaatggcctgatgattcccccgcctccaccccccagcgccgccttaggtacaggctggagacccgcatacatggttggagatgtttcgccgtctacaattcacatgccattcattcgacctaagaagaagctcaaggctcttcattgggacaaggtcgacactcctcaagttactgtttgggctactcacgcaccgacagctgaggcgaaggaagaaaaatataccgagcttgccaagaagggtgtactggacgaggttgagcgattgttcatggccaaagaaacgaagatatttggagccagcactggtgcgaagcagcgcacggccaagaaacagattatctcgaacgatctatccaagaacttccagattgctctgtccaagttctctcaatacccggccgaggaggtcactcgcatgatcatccactgtgacaaggagattctggataacagtgtcgtcatggacttcttgcaaagagacgaaatgtgcagtataccagagaacgtagccaaacttatggcaccatatagtatggattggacgggccctggcgccgctacttccgatcgcgaacaggatccctccgagatcactcgcgaggatcagatctatctctacactgcatttgagctcaatcactactggaaagcaagaaacagagcactcgcactgacccgcaccttcgagccagagtacgagcacatatccacaaggctaaaggaggttgcacgagtcagcgagtccttgcgggactctgtgtcattgatgaacgtgctcggtctgattctcgacattggaaacttcatgaacgatgccaacaagcaggcccagggtttcaagctgagctccctcgcccggctgggtatggtgaaagacgacaagaatgagactacctttgccgatctggtcgagcgtatcgtgcgcaaccagtacccagagtgggagggcttcctcgatgagatcaacggtgtcattggtctgcagaagatcaatgtcgatcagctccgcaccgacgccatcaagtacattagcaacattaagaacgtacaggccagcttggacgctggtaacctgagtgaccctaagaggttccacccacaggatcgcgtcagccaagtcgttcagcggtccatgaaggacgccagacgaaaggctgagcagctgcagctctaccttgatgagatggcgaaggcttatgacgatattatggtcttctacggtgaagacaacgcagatgagaatgctagacgagatttctttgctaagttgagctcgttcttgatcgagtggaagaaatccagagagaagaacacagctctagaagaatccagaaggcgcacagaggcatccctcgctcgcaagcgaatcaatgtcaacctcgccaacagcactcccaccgcagagacagtgcagtcgcctgcttcaagtggtgccatggactcattacttgagaagttgcgtgctgcagcacctcaagccaaggatcaacgagaccgccgccgtcgtgctcgtctaaaggagcggcataacgtccgcgtaacttcggggaccaagccaccacctgattcgggtgaggcggaagaaggcgaagacggagttgaaaagacaaccaatggcgataataatgacgagaccggtcttctgagccctccgagtaccgcgccggaagatggcaagcaggaagctcaagtatctgaaggcgaagacgttgccgatcgtgcggccagcatgcttctcggtctgagaagtaattccgatgcaggcggcggcgagcgccagcgacggagaagagagagcgcagatgaagagcgtcgtaaccgccgcatgagacgccgaaaccccacaggcgggagcaaagatagcgcggatggctctagtggccttgctacagttcaagagcctgcttctccttcgcagacagactcgatggccacagacgatcaacaaccccccggctcacctaacgagtctcaacctcccccttcaattgtcgtctcggagcaaggcgagtcatcacaggatccctcagttgccggttcctctcctcaaaaaccaactgatttgtcggattaagtcaatcaccgacagccgatttaatttaatgttttatcaattctcattgatgatgcattggattcaaacccaaatgttctccattgccatcaataccactacttactacttactacaaccgccctcgattgtataatacccattccctacttacacttctactctttgagctgccctccttgatttgacgagccgagcatggtgcgatgatacaatttctttgtttcttcttttctgtttcatcttaacagtatcccttcatgtgcaatcattttctcttttctttttgttatccactcccgcatacccaccgacaccctgtctccctctccttgtacataatccctttccccccgtcttcttcatccaacactacctgccatggaaatgtcgcgatgattggagggcgtaccatcgaattgcatgttgagctcgatgttcaatgtttcctgcattgtcgccttgttctttactccctacttccgagcgcatgtcgtggtcaagttttatatctgctgcgtatccttgactagagccgcattagatggactgctattgcttgtgattttcaggatcagaatttaaagactcgcagttagacaaaatctatgttctcgatctcttccaagctctcgattagcatgtatggctcgtgaaggcggtgatagaggcggtaagatagtgcccgatcctcagtcgcccttatcgcaatataaacatcggaccaacatttgaacatttgaacaccctcggcatctaccaatatttcattggtttaatcttgcgcatgcgagcatctcgccaagttctgcgttgggtctctcccttcagcttgccaacgagtcaaccatggcaaattatatcaaataaatcatgtatccgacgtcatggctttctctccgaatcgcgtggctgggctcccggacaagctcgagctttctcgtctactcgcccagctagattcatgctagatggagactctacaatatatgcgctctctactgcaactggacgagcagccattgcagtcgtgcgtgtatcgggtccggcatgtgcctcggtatgtattcctcgaagaactactaaagcaccagactaacaatgccattcagatatacaagagtctctgcccaaaccacccgcttccaaaaccgcgctatgcagccctccgcaccctctatgacccaacccaacccccaaccgcaaacacaatcctcgatgccggcgccttagtcctctacttcccctccccacgaaccgcaacaggcgaagacatcctcgaactacacatccacggcggccccgcaataacaaaagccgtcctttcagcaatcgcacagacaaacaccccagagcaaacagtgcgctacgccgaaccaggcgaattcacccgccgcgccttcatgaacgaccgtctcagcctgcctcagattgaagcactcggcgacactttgtccgccgataccgagcagcagcgacgactagctgtgcgtggctccagcgacgcattgctgaatcgatacgagcggtggcggcagggtctgctgtatgcgcgcggcgagctggaggcgctgattgatttctctgaggatcagcatttcgatgagtccaccgaggagcttgtttcttctgttgcggcccaagtgcgcacgttgagcgtgcagatcggtttccatattgctaatgcgtcgcggggcgagttgcttaggaatgggattcgggttgcgctattgggtgcgccgaatgctggcaagagttccttgcttaaccgggttgttgggaaggaggctgctattgttagtactgagcaagggactacgagggatattgtcgatattggggttgatcttggaggatggtattgtaagcttggggatatggcggggatccgggctgagggtagctctggtgatggtgagggggttgttattggagccgttgagaaagagggcattcgccgggctagggagagggcgttggagtctgatgttgttattgtggttctttcgctggaagacactgccactggcgtccagctattcgttgagccggaggttctgggtgctgttaatgactgcgtggaagcaggcaagtgcctcgttgtggctgtcaacaaatgcgacaagctacacactgccatggaaagtggtgtgccgcagtcattgtcagatacgatccacgacatcttcccttcggtcccggtagaccgtgtatttaccatttcctgcgaggaagcccgtcagggagcatcgtctctcaataccactacagacccgggtaatctacaggtctttctacgtggactaattgcgacgtttgagcagattgcctcgcctcttggcgtgggcggagatggaggtcaatatgatatctcgtattgggaagattctctaggtgtcacgcatcgccaaagctctaatcttcaaatatgtctcgatcatctggacgacttcctatctcaagcatcttctgctgaatgtcatgatagttcctcgcgcgagagagaactcggtcctcttgattcccatgttgaatctgaagtcgatatcgtcactgctgcggaacatctgcgctttgcggctgatatgctggctaagatcacaggaaaaggcgagagtggagatgtcgaggatgtgttgggggttgtctttgagaagtaagtactggagggtctttgtcttggtttgctggtctggatggcgagctgactgtcgtagattctgtgtcggcaaatgaacattccgattcaagtatggctccgacgaggttgacttgcatcgccgtcttatgatagcttgcttgttcggcaagagtcgtgacatcaaccggttgctggttgcaattgacatgattgaaatggttgctgggagtgcattgtccatcatgcacattctggacggcctaattttggccaggcaaaagcttggggcaagatctgctggcgggggcattgtatcctcctcggcccatggcgggaaacatcatgacgaattatttaggcagagataactgctggatcgcttcaaagtggtagacgggaggtgacgggtggtgatgtgttgatgaagttgcaagaaccgatgcaattgtgtatgaatagcagctcgatagactaataatgtatgcaatggtaacctaagaactaccaccaccgatcagcaacgcgatacttataagaaactaaagggaatcccaaaattgtctgccttggttgccggggtctcattcatcatcccaggcacccagaaacggactcttcgggtttatttccgaaaattagccaaaacactcctaatgtccttgtcaaagacagaattctgtcaaacatgaatgatctttctgagtcaggaccggatacagtctccgcaaagtactgaaaatacctggcgtgtctcagttaggccagatgtatccgatgccgaaagacaatacagcacgccctaaattattatattgagacttgggagctattcttgtcatcctagatgctacggtatcatgaagaattccaatgctgaggcaagcttcagctgtagccctgtataaggccgagtttgaggttggaacatgcttcctgggtgtcgatcattgtggttactcgcatctaagaaatttctatatttgtttctttctatttctatttccattggctatttctctttattcgctattcgactaagatattgtcggagtttcagtgtttcaattctaaaactcctgtcagatctaagaatagcgggatatctgcaaggaatgggattccttctagaaggactatcgtccaatcaagaatagaaagtaccaagagtaaaatagaaatgccccgagaataaaataagaaacccacgttgtgctgcagaacaaacatcatctctttaccctgtcatcggggctgacaaggaagtaccttgcagcctcggacaacaatgtaactggactatttagaccccaattttggcttaagagaataaaaatatcctttatactgtctataataagctaatagtctggtaggggtggtgtagagtataggccagataaccaccgatgtctgttgtgcagaatattctatgaatagcttcatcatccctgtctgtccatatggctttttcatatagggtgattagttttgtctggggatgcttacttcttgctaggagtttgttcaacccttggtttttgtttgtttctttcgcctttctttgtgtcattctagggctttttcatacatatagggcactttgacagttgatcattctacagagccttaccttggagagtgttctgtcaatgacaatactgataaacaaacaatacgaaatggaagaattcaaacattaagtatgttatttggcgacgtaagctattccacatattgcacgccattcccttagtgaaccagaaacaaaccaccacgcctcaccacactgtagcctacttcttctccctgaacaaacgaaagctctgatatctcctctcccttctaaaccaagcagcccatcacaattgcaatgaggttgaagtattcatgacgaaggaaatcaaaagtggatgtagtccgagccaggacactcatagtattcaacgtaaaagtcacggagagctcctagacactcagagggattgagcaagtatgagcaagaagggctgtgttcggcatggtgatagaggtaagagacctgaggaaactgggcacggcattggaagcagaagaagggattttggtcggtgagtcggttgccataaaacccatattcaggagactcgaaggcgagagtgcggatgcggtcctgcttcacgcaacggccttcttcgaggtggaagaggaggcctgagaacccgatccagtttgttgggcaaaaccagcattcgtagattggaagacccagaggattattacggtcttgttgtgctgtagggggatgatacatgatggatgtggttgtggatatgaagtagattgatagaggatagatgaaggatgaagaatgagggacgatgatggaagaagcaaaagcagtggaagagtgaaagaggaagaggtcgggttctgtttgttttatagtcagagtacttgctattttgggattcggtttgctgcatgtacatccctattttgtttcccttctctgtttattcttagtctcagataccctctctagattattgcatttgatattgatatggaacttctataccaaaagatatatttcacagtcattgggagttatggctcaattgaacaaagacaagccagtttgctatttacttgactatgtcaagaccaacaatgatattatgaagacaaaccctacttaattacagtgttctttaaagcttcccacctcgcaagcacaatatcagaactatccgatcacagcgccgcgataccgcaacacaaagcgaccagccaaccacatcgatcctacaactgcagatagagccagtccactgacagcataaagatcccagttcctggctttaaaggtagacatacgcatatcagccgtctgcaggtgcatcgggcgcaattccttgccgtctttgaaccgtagctcattgtcgtacatgagctcctcgataagatcggcggcatgatacttacgacgactagcaacattagcaatacgctgtaggcgaagcacattccggctgtatgtctcgttttctgatttgagaatcttcatggctttggtgtagacctcatctgatgtaaagttgagtttactcaaagactcggcgacacctccggcgaccagccgagcggtgttggcgatctgatccgagaagatacccattgataacattggctttccatggtaaagaccctcgttagcactagaacctccaccatgggtgaagtagagcttggttgattcgttgtcgaggatagcacgttgaggtgcaaaaaaggggaagatccaattcggatgtttgttgtcaagtagatcccctagggtgatttccatttcatttttatcgcctgtgttgaattggaaggatgcgctagcaaggttttagccgtgaggagagagatttgattctttaatggtagggtttcttacctgcggtcaaggtctgctcgacatgtcttgcccatagcccagatcacaccatcgatcataccatcctcttggaggcgattcgcggccttcactatcttcgcagcatccttatggggcaggatgatatgagtaccaagggcgatataaagaactgatttatgtctggccaagaatggcccgcactgttggtctagtggcgggtatgtcggactcaagagaggaccaacaggagcagcagttggaggtagatcgcgggggatttccagcccgaagaaggagttgacaaatatgagatagtctggtttgctgggcttatgaggcggatagaagacgccattgtcgcttcgcatcttcttgctccattttcctgcgcgtacgatagctggtagatctggaaaaaagaagatctcgttcatgattcgtagccacatggaagtatcctcggatgtcatggtccctggaagctggaagcctggctggcctgggatgtacgggcagggcaactggaataaaggcatattgggacagatgatggcgattggtaccttatactcaaagtgaatatcgttggctgcctcgacaaagaaatccgcaactatcatgtccggtcgagtcgcagggtcatccatgatctctttgagacgatggtaggtttgaggccagaaggagtcgaacatgtatttggattccatagcttgtccgacacccttggagatatcccatgcctgcatacgccgatagtgaccatcgagttgctcgggggttggtccggggcctaactgatgaagcttgttgacaaagtcatactcaggtttcacccagctctcttgtccctcaagtgttgcaaattcaatttcgtggccacgctccgcgagcacccggccaatttccaaaacaggggctgtataggttcttatttagtggtctatctgttcatgtttcatgttccatcttaccggcatgtgtgaatcctccggtagtaaccaccagcaatatctttctagataaatgtatttgggactggctcattgtgagaaatatggagaaatcaattactttcactaaaaacttgacagaaaagagcgaagcacttatacctcaagccccgaaatggcccccaaactaacatcctcaggccatactacggacttcggagagtttcaaacaaatcccgccgagtatagacttgataattgaagattcactggagttaacaggcaagtccagagagctgaacgatttgaacattcatgctttaaaatgatatcccataatggttacgggctttgtacatgtcctaactagaatgacaagttgctcacaaaaacatcccacttttcgaatcctcaaactgacatagagagttcctccccttttgaggcacatggaaataagtaccggcagtcctaggccctttgctactagctaggcctgagatttgacactatacatgcatgatgcaagtatgtaacttcaaaggtggcgagacaaacattacaaaccagtcacctgatgatgacagcatgtgactctttcgccgatatcggtcatggtcttcatctttcatatctcaactacttacaacatagaggaagaagagacctacgaaaagagcaactgggtctaggaagagaagaagagtttatttcatacttacttcatacatgcacctttggaagacaaccatttcatactatacaaccttgtatatgtcgatcaaccccgccattctcacgttgatctctcaaatagattatatcatagacaattggaaagtgagatgggtttttgatatgcctctactacgtacctcgtcagtatcagccatataagccatccaaagaaataattcctcaaccaagatcgtgactcaatggcgcataccgaattgactcataccccgccattgccaggattgacctataaaacattcaattgaacgtgtaatgtagattcggtgaatatatcagactgcacgttggaattccagtaaatcctgttgttggaacatataaatcgctatatcttctcttactgtccttgcaaggttgatccactacggtccacaccttttgaggtttttctctcccgcttcttttctttctcttttacatcagtccacctcaattaatctcactatgccttcccgacaagaagtctcctactttggagctggtccagctcccctcccgacatcagtcgttgaagccggcgcaaaggcattcgtcaacttcaacgacgtcggactcggactcggcgagatctcgcaccgctcccccaccgccaacaagatcctcaacgatgccaaagccaacctctccgctctcctcgatatccccgataactatgagatcctgttcatgcaggccggaggcagtggcgagttcagcgctgtcgtgcaaaacctggtccccgtctggattgagcgccgccgccgcagggctgaagccgacgtgaagaaggcacagcccggtgcggagcaggctcaggttgacgaattggtcttccagagacttcagaaggaggtcgatgaggaactcaagctggattacctcgtgactgggtcttggtcgctcaaggcttcccaggaagcgagtagactgatcggctcgaaatatgtgaatgttgctcttgatgctcgcaaggccaacggagggaagttcggaaaaatccccgctgaggatacctggtcattgactcctaccaagaaggagggcggcaagggctctgcgtttgtctacttctgcgacaacgagaccgtcgatggtgtcgagttccagcagttccccaagtcattggaggctcagggtcaggatgctgaagatgagcgtctcgtggtcgccgatatgagctccaacttcatcagccggaaggttgatgtcagcaaatacgcggtcattttcgtacgttgacttcaatctttccgcgtcatgagtgtagtacactaacaatatatacagggcggcgcacaaaaaaacattggtgtcaccggtatcaccattgccatcgttcgcaaggatctcctccctccccagaccgcgactccttcccctgctctcctccaccggttgaacattggcggtcttcccggcccaatagttctcgactacgcaatcaccgcaaagaacaattccctctacaacaccctccccatcttcaacctctggattgccggccaggtcatggccgacctgatggccgagttcagcgctcaaaaagttagcgggcaagaggaagtagccaacaagaaggcagagcttatctacggtgctttggacaagttcccgcaagtgtaccaggttgttcctgacgctagcgtccgcagccgcatgaacatctgcttccgtgtcagcggcggtgatgatgcaaaggagaaggagttcatcgctggcgctgaaaagcgtcttctccagggcctcaagggccaccgtagtgtaggcggtatgcgcgccagcaactacaatgctgtcccattggagaacgtgcagaagctagtaaagtacctcgaggactttgctacagcacagtagatccgtttggatataatatcggtgtttgagcgaatccaacctagggcttttggccaggaacgtgtgatgggtaacgaaaaaggacgccagaatgtgtccaggacagttgcgactgtttattcaacataactcccagtatatccatgctatatatatgctttaatgacaaaaatgtttcagatgttggtacaaaagcccaagagaaagtgctcagagcttccacacagcccattctttgagatcaagctccttgatgattccttttagggggccctggagctcctgaccttgcgcccacagcttaggcccagccatgtagctgatgaacccctcaggaccagaaaccaaaatcaaattgctcctgcgagagttgccttttgacgctggtgcaatagcacctcggatatcttccttcccaatgaacgtgttctcctcgtccagataataatccacaataacctgcccgggatactgggccttgagtgcctctagctctcgcacaataatagaagtttcttctgttcgtacaacatccacaggcttttccgaagtattatcccgactcttcgagccaaaccacccagagaaccagccccggcgtgactgcggcttcagcgagtcactatgaccaccagcacagtcatcctttatccgattcgcccacaagatatggatcgtcggtcgatgttcagtatttttgcgattcaaaagagaatacgcagcctgcagagctggcgcaatccccgtcccaccagcaataaagacaatatcactcgtttccttcgggatcgcgcattcgatcttgggtccacgaatctcgacgtcagcaccaacagcaatattatgcaggtagcgcgagacctctccgaagggatcctttcgaatgaagaagcgcaggcagccctcgttctcgtcgtcgacacttagcgatgtcgctgccgtcgtgggcagcggcgtgtaatcccgtccgatttgtaattgtggttgcttgaacatcacactccagactcccgtctgccatgcttcctcgtagacatcgtagttgctgtcgctgggtatgcgtggccgcagcgtgaaaaggctgctggttgccgacacgggctcgcgggatacaatgctgtatttggtgaatgtttcggggttcaaggtggcggatgatgtattttgggattggatataggcgcctgcacctgctgctgttgcgcctacgaaggcgatgcttagccagcggcgcgagttggaacggggggacttcggtgacgtcggggttgctgaggttgaagcatagcgtacaggccgagctacagctctgagaccctggctgcttctacagcataaagaagataggttgttcatgtggaagtgcaattgaagaaaaaagaaatcgcgggggcccggaaatgagggtcgaggccaagggagagccgggcgatcgacaagaaaatacacccccttggcggtttcttcttcttctttacttcaactcactttggagatttctcctctaccgacttgacattctcgttcttgacattctcttcaggcaatggagacttctcttggctactcctgacgacatacctttccgctaccctctccctctcctcgacgatttataccacacggacacaaagagaacatgtcgaatacatatcaagggaacaggaatggtagcctcgctgcgcctcgagactcactagaactcgcctccctcgcatcctcatctcccggctccgtaggcgggtcctcacgctcctcttcccccgacggtgtctcttcatcccgcaagctctcccttgaggacgaagatcctctcgcagaatcgcatcaagatgccgagctagggcgccgtcacagagctcagagctcgttctccatatcctcagcttttgatttcgggcgcaatctattcccgctgtcgcaaacacagggtggttacgcgcccctaggtactccgtccgcggacagaccaggcttcacagacggatcgctggagcggaataaaaccttgacatacctgaacggtctatcgctcatcgttgggctgattattggatctggtatcttctcgtcaccgagtcaggtcaatgccaacgcggggtcgccgggcgcctcgctcatcgtttgggctgtggctggtctgctggcctggacgggcgctgctagctatgcagagctgggaggagcaattccactgaacggaggctcgcagatctatctgtccaagatctttggagagctgacgggtttccttttcgcatggtgtgccgtgttagtattgaaacctggctctgcggcgattatctctctcatctttggcgaatacgttgtccgtgcgtttgtgggcgctgatgttggcgacgtaaatccttggatcaacaagggtgttgcatttggagggcttgtcgcagtgactctgctcaattgcatctccaccaagttcgctacccgcattggtgatttctttatgttcttcaagttcgttgctctgctaggtgtcacagtcatcgggattatagtcgctgtaactggcttctcggctggaggcaacgcaaatgaagaatggaagacgacaggatggttcgagggaaccaccaccgagatatctgattttgcagtggccctgtatgcaggtctttgggcatttgacggctgggacaatgtaagttgacactcaagtattttgaatgcttccactcacatcttacagaccaactacgtgacgggcgaattcaagaacccaaaccgcgatctgccccgagtcatccacacggcgatgccactggtcatcatctcctatctgctcgccaatgtctcctatttccttgttcttcctcactccaccattgaggcgagcaacaccatcgccgtccaattcggcgcaaaggtattcggcgcccccggagccttgattttagctctcgtcgtctcagccagctgcttcggagctctaaacgcaaccaccttcacaagtggccgactagtctacgcagccggcaaggaagggtatctcccctcaatattcggccggatcggtctccacgcctcctcgcaaggccctccagcaagcagccgactacgccgccgctcctgggccagcagggccctctcccgtttcttcggcgataactccagactcggcttcacgccaatatatgccatggcttttaacggcgtcctaacaactatctacatcgtcgtcggcgagttcggcaccctcgtcactttctatggtgtagccggatacaccttctacttcctcaccgttctcggcctgatcgtcctccgtatccgtgaacccctgttggaacgtccctaccgcacctggatcaccacacccattatattttgctgcgtgagccttttcctcctcagccgagctgtcatctccgagcccttgcaaacgctcatcgtcgtcgcgttcatcatcaccggcgtgcccgtctactactggcgtatttataagcgagatggtcggatcgatcttcccagctggaaattctggaagcgccgataaattcggggaaactctccgcctgctctgatcctgttcgcttgtatgattgtgatacccatgcgtatatagctagggtgtatggtgcgaagtgaaagctgtctctggtgtttgtgcgtgtatttgcgcttccaatggaagcctttttggcgacgatgtgatgaccatggctttaggcgggtgcattctgattgcttcatctttttgctcgttgcatgatgccccacgccgcgtctacttctaccctgttttattagagatctagcgcgctgcatactacatgcggtgcatactgtatataatcttcataatatttgcatattgtaatctctcatacaccaagcccatcccatatagaagctcgcacgagaactgcaggctgatccccgtccaccccagcatcagactctgcgaagaacagtagtccgaagcaattagcttctgggtggtagattcgtgtagatatgaccgttctgtcattgacaaaaacttctaacacacttgagtcgaagaaagcgtgcactcgaagagtttcttcaacctcgtcacctcgctcattcaggcaagtaaatagcgtgtgcggagcagtttcatagccatggtttacttcagtgtcgtcaatcaaaggtcgatggatttcgaaggtctcacttcgtgggtcccaggaaagggtcgtgcaatcttgaccgtctagatgaacgagtatcagttcagtatatataagatgaatccgaagaatcagaaaaatgtcttaccatgagtgtgtagaatcctgatacccacacgtgcacaggatctactaaccgagaattcggcgtcgatttcccatttagatgtccccaacagcatcgcactttgtgaaggtgatgtagacagggcaacgtcagcgaggtggctctcccgtgcactctgtctgagccgcgcaagtcggctatctgggttgatcttcatggtatggatcgtgaaagtaccggtaccaggtgcatcggggactgcttcaattgaggtaatcgaacttaactccgagattcgtgccttcttgacatttctcgttgtcatcaatcccactacacgaggaagtgaaagcaggccactgaatccttggcgatgacgcagagtattggacaggtcctcttccgtgatccagccatagacgatacgttgcgaggtttgagggtcgtagaaggagttcgccgcatagtagcagccatgatcgaagataccagagaaagcatatgaggctagagcaccgtctgtggaggtagattgcttttctccgttggatgtgacagatatccagaactggcctcggggttctcgtctccgacgtgcttcttgggccgcgtcttggtttgaactctcgaatggcacacagccctcggctcccattatgatgaagtcccgagacgtggtatcattggtcaaggtcatcagattagcaacttcccagttcagaccatagtcgcctgaccagcgagatggatgtagattgaggccgacgtcgatcaatgggccaatgaactcccacttgctgagatctgttgcttggacagtgtagacaaatactgttggagttttcttggaaatccctcctgacacaaagccatatagtgttgacggtgtgtgtttggaaagaggtccttcggcccaagttgtgataaaaggatctctccagcccgtcacattaagatgtggaggcgggccagtgaggaacgggttgcaggtctggcgctcccaggtcttgcctccgtcttgcgagacagctaaactgagagactcactaccgagtgtatatgggagcgtataacggattgggagatggctcacggaggtgtatatggctgtgagagctcccggctgtccaaaggcatcggttgcctgtagacatcccgtaaagacaccgaggcggtcatatttagtagcgggcgtcaagatgggatcggtggatatcgcccatgacaccaggtctggagatatagcatggccccaggagatattgccccaatcattcccgtgcgggttccattggaagcataaatggtataagcttgtttttgggtcgtatcccaatccatttgggtcattcatccatcctgctggtgccatgacatggaatgatggtctccattgtgaaggattacgaagcgatttctcttcatgagataggccattaacttcatgggttaatccgtgcatttcgccaataatccactcatctagccgggaatatgagttttacgaggttgctcggattcgcacaccttaaaacataggaaatcttgaacgagtccggtcttcaagacgattcgggggttaatcgggaataggttcggtgtaaggaggattgtcggcgaaatgcaatatatagatcaatataaatcaatgcaaatcaaaacaagtctatacaaagcatcagagtatataatgcgatagtcagacgggtttctgatctgaatatatgcaatgaagatgcattccctcgagtcgcaatgggagatctcggagaaacttcccctaataaatccggggagtttaggattttggggaatccggggaactccctttcttcaacatacaacttgagccttatggaagtgtgtcttccaaggattggctcacacaatctgcatgtctttcaagtgtggctcgactgagactcaagtcgactactcgaactcgggcgcgcggaagtcgcacgcggtcaatgtccagttaattttcgcctgtacagtgttcggtgccgcatcattcttgtacggattcgatgacaagattatatccccggttgctgcattgccggattttgtaagtgctcgtttttttcataacacaaaatgttccaagctgattcggagcaggtcgagaaattccaaggacctaacccagtcactgggcagtatgtcctcacggctcgcaatcaaaatctagttttctcccttccattggtggcgtccgtgatcggaggtctgcttgcttcgccactgaatttccaccttggtcgcaaatggcctttgattattgcgtatttcatatctatcggtggcggattgctgcaagtctttgcgccaaatttggggtcctttgtgggaggtcgttctatcaattcggttgctttgggtatcataaatgcaactgcccctttgtatatctccgaggtattgatccctaccgcttgttcaatgttcaatctcgctcattcttacaattaggtggttcccgcctctatacgtggaagatgcgtcagttcaatgaatattttgaatctaaccgctggcgtggtaggtactgtggtggtcttcagaactgaaaagattgaagggaacctatcgtaccagattccaatggctgtacaatgtgctctgcctgtgcttcttctgttcctaacggtgccccttccagaaagcccgcaatggctggtcgggaagggaaatatagaaaacgctcgacgcaacctgcggaaactgcgtgggtccagtgacgacgaggttgaagatgaactccgtctcatgatgctgtctgaagaaaatgagcgcgagatacacgcccagaccaagttctggcatatattccaacgagagcacctcaagcgtaccctcactgcgggctcatttttctctcttaaccaaatatcaggcgtcattctttcaacaacgtatacaaccgtcttcctcacagtactaggggttgcagacgtcttcgccctgacaatcatctcatcctgctgcacattagccggcactatggccgcacccttcgtcatcgaccgtgccggtcgacgtcccacggcattcgtcggaatggggattctgttcgtaatcgacgccgtggctggtggcttagcttttgacaatagcaacaagaaagccactatggccattgccgctttgtccttcgtattcaacttcttctgggcctcttccttcttctcgctgtcaatcctaatgccctccgagatggcaactcccaaactccgccaccacaccatggcctacacgatcgcctgtgcacaaacaaccgccgttatcaccaccctcgttgttccgcagctgacttcggcggatgcagctaaccttggtgcgaagacttatctcgtcttcgctgcctgcatggctgttatcattgtctttttctactttttcatgccggagacgcgtggccggacttttgctgagattgatgagatgtacgcggctaagatccctatgtggaagtggaggtcgtatgagacttcattggagttgagggcccgtgaaaaggatttgtgacagagcctcgattggtttatttttctaattgaagtctgtaaaatatactcgagtaaatactctatgcttttcgcgttgtaccgatcatggatatataaacttgggtatagttgaactcgctatattggtacactgtaaaatctagtgaaacccgatttttccatggcatgagccaaggtataaaaaaagtaaattgtacaaatcgaagacccgttcgtgcaaggaattggaaaatgacgcaggccaagtagcagaaaaaacctccctaagagcctcatcattgcgcccactctggagctttgggttccatgatctgtagcgagcgtaggtgagctctatacttctccaggtaaggatggtttccaccgcggaagctggtcataagtaacaaaaagtcttctgcgagactctgggctgtggaagttgtagttgtcggtattatttcggggaaattgacgggcatgtttaggccaatcccgtaagagggatttgtgttgcataggatgtttgtggcgcagattgcgatatcgtacagcttttcggtctagatgttgagttgttagtaagggataaaggtcagagattacagcaagttacacaccaaaccgataccatgggcttccatggagctcagccgtaatgactggcacagccggagagtggattcagcaacggagacggcatatccgaagcttagctcgggttgttccgaatgggcactcagaaggccgtgggttgaggagaggagccagacacggttctggagccatttctgggtgataaaaacgtccgctgcttgggtctctcgtaggcccatggcaaatgtgacatttctgctttcgcggccttccttggctcgctcgaaccagtcatagccgcgatatcgttcggcttggttgactcgattgagattttggtggatggagagtgccttgactgcggtcagtctctggcagtacccgttgctaccatcacatcggcggttccagcagtcgatgacatcttcgtcgatggcatcgaatagttccatcattcgtgcgagacccatcattccctcggcatccttctcgttgtggaccacaattccagagacgacgctatgcgtggcgctgtggatgaagtcatgcactgaccgcatagtgaatccgggcttcccccagaaggttattggatgtcgccgttgcaaagcataggctctgaagtttatggtcagcgagttgattttgaacagggctagtcactttgattacctttctgtaatagagaggacgaggtacgttcgcagccgctggcctttctcttccccagacaaatcctgatatgactcgggatcattcaatcccagcgtggccgcaagatctagtgcctcccgtatccggagccatgctgcgttgtgctggttacttccaaacaaacagccaaagaggaagaaactcgttagaacagcttcaatagttggattctcgccaaaatctgaacagcttcgcattttggtcgctgcgttcatcatggctcgtgcttgcagagctcgagatgaggacgtcggccgctcgttgatctcaattggctgtgtgagcgagaatgcacataacgacaagagcatggccccgaactgagagttcttgcgatgctcttgtgtgatcattgaggtgtacagggatgaccggttgagcacgggtatggtcggatgtagccgatcaaagtagacatcgatccaagggattatatttgcttcattgattgtggatggccagattgcgtcggtctcctgggtatctgagcgcatagacctcacggttggtgagaatgccatatttggaccttcctggggtatccctatggccgcagccgcagcatcggggacaggttgaataatagacgggagagatggccggagatatacattacttcctggtaaatcgaagatagggacttgcgcatccagattatccggaagccagtactcgacgtcatttcgatcgttccagctcaggccgctgttgtgagaatctatagatggggtttcctcaccccaggctgccatcggaggaggtatacctgcaggtgccaatccggcgccctctaagggcatcgtggctggaccatgagtgggggccccccaaggtgctctaggtaaagcttgaccagactccaccgatgaggatggagcttgaaattggaagccattcttagactcttgagtaggaatgacagtttgctgctgtcgaatttgcgacacgcgactttgtccctgtcagtgagattattcatagtcacgggccattactcactgcccggttggtccgcgcttcttctgtggttgaaggaatgtacaatcgaagcccatagactcacaggccttgcagggctgtgacaagctacactggggtggtcagttagtacattgactgttcatttaatatatagggggcggtggatatcctaccttgatcttgcgaaatttgcattggtcacatgccctcttggcaataggcgatttatgagatcgaatggggccagtggcagagcctggcgatctaatttccataatataaagataaagctgaatacgaagtagctgcagagctataggctcaggtagagagagattgtcggacataaaatctagtgaggtcgaagggtctgacccacattggcccccttcccctctcctgtttcctctcttttcgctcctcgaacgatcttcacgtcaagaagatcatgaaaaaacccgccaaattaactggggaacggcaagtcccgctgagattggactgaagaaaaaaaccaatcaattcatatatggcatttgaccagaatgtgccacgtctccacttgataagagtggccctcggagtgtagtccgagcagactatattaagctagtcttgacctccgtgaaaatggcaaatgatagcaaaaatgggcagttcacagtcgtgggaagagattgtcgctcacaaaaggctcatcagagaccaacttatcgcaccgtacttagttgatgtagctcaacgtctgccgcaagtacagaaccccgaggagcgtactcggctagaagatcccttgattcagaagataacagatattgacaatgttgccgccctactggaatgcctggggaagggggagttccaagccgaacaggtgatcaaggcatatatccaacggtatgtctgctatcatgtctgctatcggcgttggaattgaccatatactaatatcctcggtagggttgtggttgcacatcaattggtatgtgtctttcatcctcgtccctatttccatcgaccaactcactgatgtaatcttgcatgaatagacaaacagcctgaccgagattcttttcgaagatgccttaggacaggcaaagcagctagacgtcgagtttgcagaaaccggaaagctcaagggtcccctgcatggaatcccgatcacgctgaaagaccaattcaatgtcaaaggcgttgacacgaccttgggatatgtgggcaggtgcttcgcccctgcccaggaagacgcagtgctcgtgcagatcttgaagaacatgggcgctatcgtcatcgcgaagacaaaccttccacagagtatcatggttcgtctgagcatcatcactagctgtatccgattcggagattgacttcatttccagtgggccgaaaccgataatcctctctggggactcacaaccaatcctcgcaatccaatctttacacccggcggctcaagtggcggcgaagccgctttgttgacattgcatggatcgctgttcggattcggaactgatatcggcggaagtataagaatgccacaggctatagtgggattgtatggcttcaaaccaagcgtaaataccaaccgccaggaacaaactgcctatccaacgatatgtgctgataaacttccgaacagagtgccagactcccctatgagggtgtacccgtctccactgaaggtcaagaacatgtcccatcttccatcggcccgatggcccggaatctctcgtctatctgctacatgagccgtctgctagcgaatagtcagccctgggacctcgattcgcgatgcgctcctctcccctggaacgagactgcattccaagaaccccaagaccgacctttggtcatcggcttgattctggatgatggcatagtaaaggtccacccgcctattttgcgcgccctacaagaactctcgacggtgcttaaagcaaatggccacgaggttgtggtctgggatacatctgaccatgcggggtgcattgagatcatggatctcttctacacggtcgacgggggtgaggatattcgtcaggatgtagctgtcgccggcgagccgtttattcctcacgttgaagcactggttaaccgaggcaaggctatctcagtctatgattattggcagttgaacaagcggaaagctgcagtgcaaaagaaatatctggataagtggaatgccgtgcggtccccttcaggtcgtgctgttgacgttctgctaagccctactttgtcgcatacgactgtgcctcatcggaaattccgttgggttggttatactaagatttggaatctgctggattatccggctttgacattcccggtggatagggtgagggctgatctggatgtgttgccctcggagccttatgtcccaagaaacagtgtcgacgagtggaattggaatctgttcgatctgaaacaggcggatggatatccggtgaatctgcagatcatcgggaagaaactccaagaagagaaggtattgggggctgctacagttattgagaagctctggaaaagtcatgtcgacaaatccaattgagctatctaggatttataggcagaatataaagttgggtcaactcgcagactgaatagcgtacatcgccgtggattgcactgatatttggaataaatggtagacgcaactcattatgcagcttgatgggatatctgcctccagagtcacttaaatgacaaacgccgtgggaatatgcaacaaggcaagaactcttgagtctcaagccttgggaggctcgaacaaatctggtttcatgttaatcttgcaaagcttcgccacacagccactcaattgaagtagtgactgcacaccatccagaatacgcatatgcgtgaatccaatctcccgaatgaactccaatttggaatgctcagacaatgtggggatggtcttggtgactcgaaacatggtacttatgatgtcgtgagaggagtaacccagggtcctttagatagatcggttagaaaccagcaccccaaaacaaacaaatttacaacataccatagctcgttcagcccctccagtgccacatccaccttgccttcccaacaagccttgatcatggcctgaactttgatcgggtgcgggctgtcgactactcggaaaacattgtctccgctgacgaaaccgaaaccggaccaagtactctgcaggttgttgatggcctgacgcatgtcgccctctgcactgaaaacaagtgcagcgattccatcctcggagtgctggacattctccgcctcgcaaatctgcatcaaccgtttgaccacctgagcatctgtcagtcgggcataacggagaatggcgcaacgggattgaatgggttcgatgatcttgttcgactggttacaggcaaaggcaaatcgtgtggtggaggaatagatttccatagttcgtcgtagggcttgttgagcaccggcggtcatgctgcggggagacgtgagtccagtgaccagaaggaaactctgacgagaacaaacctatcagcttcatcaaggatgaccaatttatggcgtccttgtggcagggtaaccttcttttgggcaaaacctttgatccgatttcgcaccacatcgatacctagaccacagcatcaatatcgaccaagtcatgagagcgattatgccacaactaacctctctcatcacttgcattcagctccagaactgcctccttgtatgcatctcccagcatttgccgcgccagacataatactgaagtggtctttccaatacccggcatgccagagatgataacgtgtggcatattaccatctttggcaatgatctttaaccgttccactgtttcagtgttgccgacaatatcatcgaggaaggttgggcggtatttctcgaccctattgacaagccaaagattagctctacctgatattgtcaagaaaggaaagcctaccagggaagctcatagtccacaggggcaccggcagtatttgccttagcagcattgcgagaagcagaggaagattcagcttgaaccattgtgagtgatttggtgattccaagtaaagaagagcagtgaaggaaagacgcgaaagaaacgcgtgggaaatgcgataacggcttatcagctggcctgtgcactttgcagatgtgatggcattgatgtatggtgcattgaagctgttattttgagattttatattacagaatctgtaaaagactgagtacggagtagtcaatcgttcgtaggttgactgctgcatacgtagtttagttcaatgctatcgttttcgtgacctgccccccccccccccccccccccccctctttttttttttcctccccccccccccccccccaaacttcattctgcgccattcttcctctcttcgccccaacaacaattattcttaatacctagaagtcggccaatgactccattccttctattttatacactctaataggcacagctcagattaacctactcttcaaaccatccattttcctctctgcgacgctcacagccgctgcatactcagaactccggccaaacccaacggagaagcacaaaccgtggtgtatacagtcatgcaaacatctggtatgatgaatcagacctctgtgcgccgtaacctctttcatgggaacctcagccgccgacctgcttctgtaggaccacctaatggcacagttcctcaaacccacggcggcctttccaatcgtccctcgcaccgactgaagcctacatcctcggactcggggccacatactcgaccattcaaaaatgcggaaaataaagatattgtggttcgggacaagaatggcagctacaagcttgagattccaacattgccgcaggttctggttggagaggacggcgaggagctagctgaacttgcaccagagggtggaagattcaattctttggaactcaatgggcgtgacaaagatagtatgcttttctacacgctgttttcctctgaagcatagtctgctaatattgacacagagtttgaggcagctctcgtggagatgatggttcggcaccggaccagacaatcaaacggtgaacccgatggtaagttacagtcagattgagtccgacagtcctatatgtgatcatatactgatacgaaacagagattctgagtatggtgcaggaaagcctacgcaaaaaggtagcatcactggatgaagacaattggatgtttgagccggagaaggacttggtttctaactagagggctgcgcttgctgcatgcatcctgatctcattacactatcagtcggatatgtttcccgtaaaggcctgcttcaaaagacccacgcacatctggtctctcttaatcaagctccatgctcgatggcggtgcctcaaccttcttcacagctctggattgcgatgctcctctgccacctgtcttgttctgacctcctccgaacaacataccgctcatcatgtccatcaatgggtttccttgccggggaatcttgatggcgaagtactgctcgccaatctgagccagagcatcgtcccagataccaacttctcgaatttgtgctgcatagtgtgcagtgagctgtcggaagagatcggcacttccgcgctggatggccaaaagcaacatggtgatgaagtttaccaaaggaagggcagggaacacccgggcgtcggagctggcactgctgacttcctgcacaccgagctgaggattagccgctgaaagccgcgaagtgaaaataagcaaggctttattcgcgctgcggagatttccggtgaggaggtatgggaaaactgcgcgtgacgcatagatcgctgcggtgtgtggctcatcgttggtgtaccattcatattcgagctttgcgagagtctcggctgattcggaggttcctagaatgagatgtttctcggcatcgtatggctcgttatctgaggcattagattagtatgcaccaaacattgcgctccgacatcacttaccttcggcgtatactgaaccaacagcatgatgtaaatcggcatctcctcgttccagtggtccgaactttgcactccatccaattatttcttggatgaacctctttcgtgtaggttcatctgacgggaattcgcgtagcaactcgatcaggcgctctgaagaacaaagatatacaagttagcaatgttaggcctgtaatagctactggggtaacctgaagcaccaagctgcagtaatcaaccccagtagtaaaaagatacttgatagactcactcttccgagcccgaccctctgcatcatcattaccgcctgagatctcccattcggctttgttgtatacttcaagcaccaacatgatggccaagtccccaccactggccgaggcaccctgccgagaaccagctttcaatagctccttcgcgccaccagccaggatctccgctgcagcatcgtagttggactgcttgatataccgggcagcaataacacgtagttgttggtgagcttcgtagtaggcgccatcagcaatcctacagacaacgacataagtcagaaccagatcttttgaagtccaaggtgattatggattctcacttttctcgctggcgggcgatgaccttatcaatccgggatgacatggtcgactagaaggaggcgccgagggattatatcaaagaaaagtagaatcgaggaccctatcaagcagagtgcgcaatgcaagaacgttcgcgaggagttggttgagatttggtggggacacggcagttcgcccagggccctggagaacatgacatctccgtcatctcctcagaaataccttatggttgctttgtagctgaaactgcttttgtttttacgtggaatctgctatttctactatttggactctgttcgttttattgaccccttgtttccggcgatattacgatgataccacgccattacggacatccctaacgactatacagctacctagctagtcgcgacaatccatatcaaggaccaagcaatcgctcttcttgattcagccatgtccatcacccaatagtgcgccaaattcatcatgaaccggtccacattcaatatccagcccctgcaccgcttccacagcgcaaatacctctatccggagaccgagggtaagccaaagacctagtgctatgtcaaacaaatgaaaatgaatcgctcacctgctgctaggaaatcgcttgcttctcttatgatgaaaatcgtcgtttttcgctgggcgattcgtccatggcctactactacacgccggctctccctgcagacctgaatataggctatgagacattccagaagctcaatgatgtcccggatgagcacttagatgctttacttgatacccttgttgctcatgagaaagaaacagagaagaagtgcgatgtagacatcgtcacatggagaggaatgatgaccaaggtgtgttgaattgaagtctatcgcggactatcatctggtttggaaccaaattcttacctctatttgcagattctcaccgctccctttgataatatgaatgggtttgtaaccatgatatattccaaacatagcgtgctgtctctctaaccccaggctatctctagcttcgagatgaatgcaacttgtttccaggtacgatatcagtctcaacaagattttccagattccatgatctaacatctatcaaagggtaccatgtgtgtatacctagctagcaagttcacaatataaggtgttgacttgttctagattcattgaggaaaacaacgaatacaaaaaccaacagaaagagatccaacgcaagcgaggatcgccacctggaatggcaccacaggaactcatgatgtattggggtgtgtcaaacaacccatggaaatgtgtatagactaacaaccctaggctataaattcgaaaagctggctgtacttccgaagacgtgggatgaatcaacccgtgaagagatcgaaggccgccagaacgaagtcgtcaacaatgcagcacagtattgctcggttgtccgcactgggatcggtaacgtgcgtatgattcttggtggagaggttgatgccagtatgtttaccttgattctcgtggctatacctaaatctaacttatgttctagtctgggacagcaagccatcgcgaaaagaaagccccatcaactgggttgagctgaagacatcagctcagatctgcaatgaacgtgatatgatcaagtatgagcggaaattgctcaagttttgggcacagtcattcctgctcggtgtgcctaagattattgtgggattccgtgatgagaatggtatttgccatagcttggaggagctagatacagctagcatacccgggaaagtgttgagcgtcggccggcgttcttgggatggaaacgtctgcatcaattttactggtgcattcttggagtgtgagtgttctttttcgtgaagtcatagcagcactgacacacctcccagggctgaagcagactatcaaccaggaagggacgtggagaattcggaagaaggaaaaatctccggtcatcgaggtctatcaggttgaggagcaaggacatggcgatattatctcacctgctttcaaggcctggcggtcgaccacgaccaatgcgagttcgtgattggaaggtctaatgtatgatagtcagtactaatgtatttcattgcttgagtctcattgcaataaatgaaatattgcacaggcacatccattgaccttacgaggcgagcggctgtccaagggatcccccaagcgactacctgcacctgagctttacacggaagattttccctggctgttgaaatagcagaagacttttgggtatttctatgtccttaaatatctttgactatgcaatgcgatagctcatgacccaggttcggtttcaggggcctgaatcccctgagcttccaattccttctttcggaaatattcatctcgctgtgccctcttcctcgcagacttgagtccccttttatgctgatgactatttaaatgaatatgccactggtcctcggatgccattgtcttctggcagacgtcacaggtgtagcacttcccgatagggtctgcctgcacacgcttttcctgggcttccttcgcgctgaactccgccgttgctaactgagaaagcgatttgggatcgggggtcagcttattttgctgcatcagttgcataatctcttcggacggctcagtgatgcacttgctccagtcgctgacattggaactgtctaggagataaagacgacgtgtctctccgacttctgtgagtgcttgccagagtttattgcggatccatttgacctgcgatgttccgtactgtcgtgtggcgatccgaattaattcaagagagtttcgtttgagatcttcgatttctttctcgcttgcttccccgtcccggatagccttgaagtatggcgccaattccttgaatccaatggacacccagactccccgtgtttggtcaacttcaattccctgcgaggctttctcctgcaagtagttcgacatcttctccgcctcggtcatcaagccctgcttgaccatgtcatcgacgcgcgcatccaggcgtgcgttgaggacctccttctcggcatggacccaaaataccaatgtattctcgaaccgtagcagcccttcctcctggtctatcgcctttctcttttgagagaattgctctttataaatctccgatgctcgccgccctgtctgaaaatagatttctaatgaccgccggattttccgtgcatctctcgggtgccatcgcgcagccataacgggatccacctcgcgcagcttctccaagacaacttcaggcgacgaatccagaatcggccatttattcgaggttgtgctaaactccatgagctgttcccgctcgccttcgtcgtccaccccctcgcccacaagctgttctttgaacagcactgcttgggtataatagtgggtgccaccaacaagaatggggaccttgccacgggcgtggatgtcttcaatgactctcagggcttctcgtttgaacagtcctatgcgccatgcttccgcgtctaagtcgatacaactgaggaggtgatgagggataccgttccgttcctctatcgggatctggttcgttatgatcggcaaaccgcggtacatctgcattgcgtcgccattgatgatttcaccattgaatcgagaggccaagtccactgcaagctgtctacagctatcagtcattgtgttcggaggaagttttggaggtacctggagtcattacctttgacttgcctgtgcctgtggcgcccacgacagctatcagcggattcatgattgtttgaccgtgccaaatagatctgagagccgacagcataccgcgatgctccttgcaacgacgtgggggaaaaagttgttatcggttatcaagcgggttacctcagccatggcgtccccaacccctcagggtcgtctcatcttacaatgagctaacatcaaagcagtctagataagtctggattgataaccttgtctgcttcatttttatctccttcttctcaaacttgtcgagtttgcttttttctcagtgcttttttttctcacacattcgtcatggcggataccaattccactcccccatccattgaggtacaaaacctctcgtacaagttccaagatggctccagtggcctggagaacgtaagcatgagcttaccagctggaagccgcaccctattgatcggcggtaagtcaaatccatttccatttcagactaatcttgacgactaaccaaaacacagcaaatggagcggggaaaaccaccctcctccgcctcctatcagggaagcgccttgcacccaataacaccatcgccattggtggtaaggaccccttcaaggacagcctagacggcgtaacctatctgggagtcgagtgggtgttgaacagcatcgtccgcacggacatcgatgtgccgacgcttctcgcctctgtcggtggaaatgcttatccagagcgccgggacgagctgatcgatatcctcgatgtcgatctgcgctggcgtatgcatgccgtctcggatggagaacgccgccgcgtgcagctggccatgggcttgctgcggccgtggcaggttctactgctcgacgagatcactgtcgacttggaccttttgtccaggagcaatttcttagctttcctaaagcgagagactgagacccgcgcctgcactattgtttatgctacccatatcttggataacctcgcccagtggcctacccatttggcccacatgcacttgggcaaggtcaaggcgctgggtagtgttgagtcgttccatgaggaagttcccgcgtggacttcggagaatagtcgtcttggagagctggttcttaagtggctcaaggaggatatgcaggccagaggtccccggaatgatcgcggtaatcaggccaagacctaccagtcccttgagggtattggaggttacggactggaaaaacacgactgaggagaaagatattgatcttttcttatttttcccgttttctttcctgtttttttctttttttttttgcatgctagcactgatgtcgggagtcatgtaacgtgccattcaacaacaattcggttcaaccacaaggcatacacggggttataggttggcatctgcatctacagggtctattcaacatttgggagttttcaacatcacaactcaggctagagatatgtttctttctatacaaatcatgagagtatgtccgagaatatatacgtgtggacatagtcctcacttggtagttctaactgatccctgatctatgatatcgagtcatgagatataaaataggtacaagcatacctataatctaaatatgaagttggtctaacaagataccatagacgttctgtactttgattccactttgttttcgtagatgtcttcgcaaatgccttccaaaatgtttgaatagacctcgtaaagccatagattgtgtgtttgcctgccacatcagaatgtgaaggcggtcatgatctctttatatctttctctccttcctctatctgtctcttctatttctattctctctctctctctctccctcgcacacacaccccccaagaccagaacaaccccggaccctctcaaggccggcttctttgcattttgtcttctcttatttcagggaagtcacaatgcctgacaagggcaaaaaaagagtagcagtaagtgaaaccaagtcgcaaggtttttgtcacgttgaaccttgttgaagcgtctgtttatcccctaccaaaggaggtaatgtcgacatagactgactaattgaaaaatagcaatggtgcacattttgtgagatagaaggccacacccaggaggagtgccatcgctgggctgcctgtctgagagacacggccatggccaataacatctccatgatggcagcatacaagccctcccaggtaaagccaccctataggacattctaggagtcatcttattaatgagtctttggtagaatcagaagaccaacccccacaagaagactcatcgtagctaccgtggtggtcaaaatcgcacaggtatgtaatcttcatacacccaaccctatcttgggcttgattccttggaatatgtggtttgccttgcaatcgcccttgaaacaagcgaaatcagtcatttgacaccacttgattagtggatggcatcaagaaccatcgagacatgtcctaacaatgcgtacttagcccgcaacaacctccctcctcgcccttcttccttcgcccagtctggtatgtgaaccttctcaatttataaaatccggttcctttctatatacctccgagcatcgtttttctggtttgagctgtaggctcgtcctgcggttgtattctatgggttcggcttataggtttagcctaagtattcggcctgtacctgctactgagatgatctgtcagttcaacgttacgatgtttgaattgtgcatttatagctcaaccccacccccaacatctatagggcttactctaaatattgttcaaaggacatatgctaacttgtaggtgattctagtgggcaccattaccgctactcggggtagctctagcgtggagcctgacctgctttcgatattagtgcaggtctctcggtccgaatcagagcttctccttcggttcctagagaaaattaggggagatggaagcgccgacttcgtagagaatctcttgattggggacgaaccaaaacaggaggaaaccacccagggcccctgtaaagaatctggtagtgatgaggtcaagaaggaggcttagtttctcaacggcatacgatgttcttttttcaccttggagtaatttaatgaccctgcatgatgttccttcacttcccacgtacaacaacatatatttcgatagttttgtacgaattgtacattggtttgcgtctgatattaaatagacatttacagacatctcaaaggatctcaaaggattaccgaagggacatctatctacaaagacattaaaaggatatctcaaccatcatgactcataaagggcggctgcctaggtaaaactatcttggttctcgtataaatcatgagagcatgttcgagatagcatatatccgtgtggacgtgtcttcacttgccaccgccaattcgaatcgatctctgctatcctctgcagccggcactggtcgccatgataattgagtaatcgtctttgagggcgagacctctttgtcaatggtcacgacgtgctgtgcttcgagggtatcagcagcactccggtggatggagatgacaccattatcctcgccgacagcaataacgtatgtgcctttgtatattatgggcaagaaagcaatttctgagacggccgatgtcagggccacggtcgttttgcaaacgaaagtgtcttcagacttttgccagatcttcacagatttgtcacgtcctgccgtagcaaagacatagtctgttgtagctggggcccaggccgcacctaggatcattcgagagtgacccttagggttcaagctgaagtttgtaaaggtagttgggtctgtatcgctccgctggaagaccgcccattggcgatctcgtccaacactgagaagataacgatcgtcactcgagaatgagaggtccgtgatggttaacgagtgcgcagtgagagaaggcttgatctcatgccagtctgacgtatcgtagaggcgaattaccgcatggtcaatcgagctggccttgcaggcagtagcaatgagcctacggtcatggcttactgccactgctgatatctcataaccatggccatagagcttttcatgctccggccacaaggtgtaacgagacaactggtcctccagcggcgggtggttggcagctagcaaggcagaggcgactggcgcctcagttggggctttttccccgtcctcttccactggtgcctcatctccaagtgccttgttcgaaagacccagcactggaatctcagcagtgtctgggaggtcctgatcattcgattgtttgaacccagtgagtctctcgagcaactgagcaatttgtttgggctcgttgaacacacgcaagagcttctcctctgcaccagtcacgaactgtgagggacccagagtatcgacacagttcaaatcgtacccatgaatctgagggcgggaaaattcatgccatgaacctgtatttccccgtacccactttgcatgaagccgcgtggtttggtctgaactcgttgaaagcaggtagcctccaatgggctcccattgtaaaccgtttgcggagcgcacatgacccgaaataccaaacctctgtacccaaatatccgagtcggactcaagtcgccaaactctccaacttcctgtccggccaagacttaccacctgcctcccatctggtgaccagagcccaatccagaagccacctgcactaccagtcgccgtggtagatcctttttggacactgatctctcccattctctctgtggacatccagacgcctgatgcttggtcttgttcccaaattgtgatggtattatcagccgatgccgaaagaagttgctgccgcttcgaatcaggattccacgcaatagtataaatccaatcttcatgcccaaagagaagagcctcgaaagtaattgagtatttcgatcctgcagcctcaaactcatgggctttgttcgatagcgtaggctccattcctccaagcagaggatctgtatcgtctattggagcaggtacacttgcttcaccccgacgaagtcgccagagacggatgtatctgtcttgacttgcagacgctagcaggatatcgccgttgctctgcttgtcctgagtgaacgcaagagccttaatccaggcttcatgtcccccaagtacggcccgatgcttgaattctggcttgccgatggaggtttccgagacgtaaatatgaaccttggtcgttgtacctgcaacggccaacaccaatggcttgtccgagtcgccttcaagtccctgcaatgatagagatagtgggaagaaccttggtaccattgtgatcatttcaagtagctcgcatttcaacccatcctgtgcatttattctccaggtccggaccgtcccatcagccgctccagatgcgatgatatccgttccatcggcgacagcaatcgcattcacggagcccgtgtgaccctcaagggtagatgcaagtacatagttgtggggatcggcatcgtcttttttccatacccgtattgtgcggtcgacggagccggtgacgataaatctcgttcctgaggcggggcatgtataaaatcgaacgacgctgactttgtcggtatggcccacaagcagagcatggatgccacgatcattcttgtccttggttaagtgtcagcttgtcgttatcaatgcgcaattgttctcaatagacctactagaggatcccataaggcgacattgttgtccgcaccgaaggcgagcaagcctgtctgcgcatcccaatccgcggcaccagggtgccggtttccccccacgctgatatattctgtgtcgacggcgaccatagagtactatgagggcttatgaaccctttgtctgtctgtgctgctgtactgggggaatcaattggaggaaagccgcaaagaaattgcgggaaaattggggcttatcgataagaggtgtctccgcctagcccctccatcttctcaacagactcgacttgtgatctctttacattcttctcaataagcagagataactcctatatgctctatattcaccttcgtctacaacgccatggctgatacttcaaatgcggaccagggagagttccccatctctatcaccgtcgagtttacgtacgtcaaatctttccttcaattgatcaagctctgctgataattgattcttcgatagcggcggcttagaattgctattcggaaatgagcgtaagcataaggttgttctgcctgctcgtttagaggacggcagccggccaaacatctcatacctgcttaaatacctggtcaacaacctcatgaaggatcaaaggatagacatgttcatcatggaggacaatgtgtatgtcaacataacttcgggggttgaacagtattaatggttcgacagacgaccaggaattctcgtcctcatcaacgatgccgattgggaactcgaaggcgaagagacatatgaacttcaacaaggagataacattgtttttgtctcaactttacatggcggttaaacatgattgattgtattgatattatcaacgcaattaagacaaaaaaaaacttgattcgaagtgggctggaagaatgtgagggcaacataaagcgtggacttttacctagaccacatcttcaacatgctgttgtgagatccgttcgcgctcacgcggtgttcggattccactgggtgttcgatgaccactctgtggggttacttgaccatctgggctaccaagcccttgcgccggtgataccaccccacttgggggcactgggatcttcaaatcctctggagaggccgggataatctcttcggggaggtcggggatatggattcgctgtgcctcgttctgatagctctcgggaaggatctgcaatagtgtcaattaaccatagatattaatccaacccaaagtccaatttacctcaatgatctcatcgcgagggaattcaaggaacggaatgtctgcagcattgcaggccatgagatagccatacaaaaccctcaagacactctcgtgtgcaatgatgagcagatcggtttgctccctctccaattcaagaataattggctcgaggcgaacagccaagtcatgataggactagtgcaaatggtcagcagttacacactttgagggggggttggtcaaggcctacctctgcccgtggataacggtggtggtagggatcaagctcgtgcttagcaacctcgtcaccaaactctgctcggatacgatcctcagacatcttctcacaaacaccagggttcagttggctcaattgggacctctgtcggactttatatccgttttcatggaagtactttgcggtttccactgttctgcggcgtgtggaagtccaaaccttcaagggccttgactcatagccagtctctcctcgttcaatcattgcttgcttttcttcttcccggtgagctagaagacgtgccgtcattttcttggcgtagtcttccccctgatccgatagcgaagtatcggctttgtatgaacctgcgtctagcgaaacgccagcctaggtaaaatgtcaggatttttgcatcgtacaatatggactgtaggtgacctacccgagcgaagtacgtgcgtctcgatttgatatggagatttagaagatagaagacgatacggttagagagataaccgaagcttcgattgttgacaatcaatctctcgccggcattgatcatctgtatttgggtgagtaatgggaataggaaagaatcaattgcgcgtaccttgataaagttcaagtccttttcctccatggtctggaattgggggatccgagaatagatacggttcaagtaatgcttcacggcatcttctgatttccacgagacgtactagcatagtttgtcagtttccattcaatgccaatatatacatgagactcacatcaggggaggagatcttgactctgcgaacattctcttcaatgatgcgttcgtcgtcacaccacgactcaatgaacagggtctggtaaaagataattagtctattgtcaaagattcaaatgatcaactctgacttgcctcgatatcatgcttcgcaaactccttggcaagcgagcgccgtcctgagactagcgggttgacggcatcatatatcgctatttgaccattttcatgattcaaaaagtgatagatgtcttctcggcattttctcacaatcttttggcgtagaaggacggacttggcagtcgctaaacggaaatgtcaatatggtcattcaggtagctcaggataccatgcctaccattgacatagaaataatcatctggcatgtcctcgccaaatggaattgtggcacgacggtagtcgcctagatggaagattctggttttgacaccaagcctatcaatgcatcagcatacctgtaaatgcgcaaatcacaggagtaaggcataccatcgcaggtatcgtgccaaagctactgagatatgtctgtcatagagttgtaattagttcaccgcgcaacactaatctcaatgttaagaagtttcatacgttttgcctctggcaggcaagccgacggtaatgatcacaatgcggcccgaatggaaaagccgaccagattcggtgctgtacagctgggccggagccaaatccgccttttccggcaagtcatgaattgcatcgacaaagattgaggacttgcgacggaatcgtggggagttggccacaatctcagcggtgctatatgatgtcagttcaaatccacatcaggctacactcttcggccagggtatggctcgtgctttctcttcttcttttctcctttttcctgacattattgtcaagcaaaaagcacacacaagacaacatttcaactctcatggagaagacatgagattgggaagagggaaaggcaggcttacagtaaagtgtccatggtgggatgtcgaggtggcgcaaccttgagatgttgagatatcacaagattcagtatccagcgtgtcaggggtatcgatcgatagctctgagagagaccagatattcctagtcacgtcagccgatggcaagacagtgaagggagcgagaaacaaggaacaaggaaggtacctgagaggcggtataggtaatcgattaaggctcagataactatcaggtgcagctcatgggcttttatttgcctcgtttttcaggctgcaatatgcaaagtgatgcaagcacaattccacaccaaatagaatggaaaagaaagaagcacactgcaaagatcaattgatatcaggtcaaatccccccaatccttcccaatccctccggtcttgcctgaaccgggagagcccgaagcagcttatgtaatatcccggtgaacggcagcaaccaaagacgccgaggcaggtgactagcatttttcacagcttagaagtcttgaattgcttctcctacactcccgagcgcatcagatccagccctttttactctattttatcaaggtcatctgagacgtttgttcgtcccagatcctcgggctggtctcaatcccttttattctctattcttttgtgttttcccccgagtctcaattgagaccgagtaacacgcgtgacgacacctaattattcgtcaattatcagatttcaaccaaaatggccgattacctatcatctctctcctttctcacagagaaccctgccgctgcggctattaacgatgcatactcctcgttctccgaccgaagggccttgctcaacctacccaaccccggcactgtcgataacctggccagggaagtgcagaaggatgttctattgaccaacttcatgttctccggtctccgggcagacctgaccaaggtcttcggcatgtcccctcttttccgtgtgtcgcatgccttctctatgggctcaaccggcaatctgcctccatatgctttctccgccatgtacggaagccccagggtaaggacaactattccatgcgatgccgatcaccacaaatatcagtatttaacatatcgtcccccgataggtgtttatgcagggtaactacggaagtgacggtgccctcgccgccgtcgccaactaccgctggaaccaggcccttgtcaccaagaccaatgctcagatcatgaacggcggtagccagggcttggtccagatagataacgactacactggccgtgacttctccgcgtccctcaaggccttcaacccctctctcctcgagggtggtctcaccggtatcttcgtcggcagctacttgcagtccatcacccccagcctcgctcttggtttcgaggctatctggcaacgccaggccatcaccgctcgccccgagacagctctgtcctactccgccaagtataagggtgaggactggattggtaccgctcagctccaggcccagggcactttcaacgccacttactggcgcaagctgtccgagcgtgttgaggctggtattgacatgaacctccaactccaaccctctcccgctactcttatgatgggtggtccttctcgtgacggtaccactgccattggtgccaagtacgacttccgtgcgtcttcgttccgcgcccaggttgacagcaccggcaaggtcagctgtctccttgagaagcgtattgctatgcccatctctctctccttcgctggtgagatcgaccaggccaaggtaagcgacatatcttttttaaattcctattgatgtcaatgctaattatcttcttttctttctagcaaacggccaagctcggtcttgctgtctcccttgagcttgctggtgaggatgtcatggagcagcaggacaaggttgaccctgctaccatgatccctcctcccttctaaatctctcctctcgcatcgcccgagataataaccctttcaccccccatgttttagtagttcttcactctcatgtctgaaatgacatatgtttgtctctcttcctcggtatatcctcttgaatttgggttgctggtgcaggtggccagttgtttggcgccctggagattccaacgttttttttgtatagattcacactccggttctttgatttccttttccattaccacctgatgctgcatctctgtttggcctgtggtctgatatcttgtgtctccttgctatctttccagttcatttccttgcatggccatgttttgggtctatgggattgccaggcctgggatgcatggctgcgcctgcagatagctctggttatgtttttcgcatcatagaggggccaatgtaaaacaagttttgatttagttgagtttggttaagttgagtcaattgtaatgatttcattgtgaagtgtttcttgctaaggatgtccatggtgcggtcaactctttgtccatgtggatcaatgtatactccgtagtgaactatgcgttggcattgccaaaaatcagaccattcaacatctatattgatctttctttgaaggaattttcaattatttctcataactaaagacaaagctgtacttcgtactttatccgcagatatcaaacaagacacaaagcggagaggaaaatagtcccggataatgcccgcatacacccaaagcggtgaccgggacgaacgatggcattttccaagacaaatcagacgaatccatccaacatcgctccactatatgcagtgggcactggagcacctcctgcaattggtagacgactccggagtgcagcagtggccttatgcatctcctagaatgggaaccgtctctgctttcttctccacttcattatgggactaagtttctcgataaagtgggttcgtttatatgttgggtctcccatgtttcgctctcgaaaatgatacggagggttattgtggggtgtttgtcctggaatagaaaatgaggtacggtgcagacgagatttaggcacggtgtgctatggcactttcgctcccatatgacatgtgggatcttcagccacttactccatattccagcccgatggcagtcgtagatgggccatacgcacccagttccctgcttggagtgtggctgggttggagtgctgcctcgctattggaagtcccgcggttgatagtcgttcagacgctaattatctgactccagtgacatcatattccccgttccaccctctttttagggctttgtcctttttttgaacttggcggttgccctatgtagaagggactggccagtcatcttcgaggccggatatgcacctaaggatgtatgttccggataaatggctgaccccgggaataatcttctaggcgaatcagaattgaaagcagaatgaaatgaaaaaaattgaaaaggaagagaaaggaaattacagtttagagggggtccgagtgtgtcggcccaattgacaggcttagttttggtaatacacaacataggacatgctgttctcaataatatgatttctggaaatgaatgtgggtagcgtgtccacaagacacattcattcccctgaggttcattggtaggttgggcgatttagaattgtatttcgttctaccggtacggagtaccatggaggtcttgcccagggttgtataccttggcatgtaaacgatacttgttcctcggccggagaatcatgtaatcatacagtaactaactatgatatctactaaggttcttctatgttggaatatgaatatgaatagacgcaatgtgtgcttttcaacagatcggtagatttagatcgtcatgaacccgtagcgtggaagactggatccaatttggagattgaaccaatagcctctaggatgattcgcataattgcttgaatcttgggtacgatgtacaccgtaagtatcactttcaacctggaagacgccaagtgctattcgtacatcttatatctcattatacttagcctgcgatatcacccacgtgtctgatagagacctcgaatggaatgccgttccttgcttccatgctttcatgatctgtacatgccgacggtgcactattgggctggcattccgacggtttcctcccatgcatatgcattgacattttaaacatcatgccagtgccgggaggtgttgcttttgccaggaacacacccgattctcatcccgggtccgtgaaacaatagtgctactggtatgcacattgtgcaattttatacattggatacattgtcggggatgtatacggtggatatggacgtccaagggtctatgatgtgtgggttcccaggctgggtcagtattggatattgaatggaatccactatccttaaaaggtaagcagttcgatccattgctgattgatattgagtagcgtcagcaaatggctgggcatcttgttagccgagacccgatggacatatcggaatcccgagtgtacacctgcagtcgtggtaccgatgcatggttctggatatttcaggttgacggcgtcagacccctgctgatggggcgtcaaattctgttttgcctcgtgtcaagcagattaactaatgtcgcatgacaagttgaactgtggcgattcggatccgtcagccatggtcacctgctctcggtctggtgacgtcgatgaggggaagctatagtttaaatttacggagtagatggcgagaatgtagatatttctttggaatgctaagatatgacaaatgatcttgctgggcgaatttgctgagcatctatagagttaggggaagagaatactataactattgtatatggtagttgatcataaataataaatgcgttgccaatcaaatccaaatgtcacgctcaaataccagtaaataccaatacaatacaatacaatacaccaggtaagctcctcaacgttaaccgtttaagcctggtgcatccctacggagttcagtcctctttagtacctgagctggtgccaggaaccaacattcctccccccttcatcagaaggtttctttttcccacttaatacctgaattcataatttattgtctttctgatacatctcattctgcctgccggtccagatctttggtacaagagactgcatggacgggactacggctggaatcccaacgatggcgtcggctgagatagcttcgactcacatgccaaggaacccctgcaccaatgcacttgatagcatcgagatccctcgaaagaatggaagtgcaacgggagcccctttcaattccgatggattatccgggccgaagagctgtgactattgtatatggctttccaaccgctcggtctggatcccaattaccggtgtgttaattattattatttttctcggaatgtccctgttatgcagcgacacagatagaaagccaaaaatgatttagctagtctgtcgttagtagtatactagtcgatattattagttatagaagctggaataactagtgcctccagctcccattgtcgctggggccgtctctcggcccaagctccttttttttcgaggtcagctggtctcgtgatagcaaagaccgcttacagtacagtaatggccaataacggtggttccagggaaaatcaccgttgggtcacccgacatcctgtttcttttgtatgggatgttaggggtgttaggctataaacagattgagtctgtccatgatactatgtatagctcgttatattcccactaccccggagactccgctttctccaaagtcttttctttggttttacggtatggtaattacgccatcacgtatgatatcatctcccgacgtggaaatacggtcagtgacaatactatactgtaaggaataatcgagaattgcatcttgattcgagataatagtgactggtaaatagtggtagttcaatagtgattaactacatgtatatgtatgctatgtatgtaacttataaaacacaaaaaaaaaaaaaccaactcccattacctgagaaagttggatttcaacttgaccttgtagctctcccgcccctctctttttcctcttttcccctcccgaattgctcaaaccccaagacaattggctttgatcgtgaatcctccctcctgaatttgtttctttcacacaactcaagaatcagatccaaaaaaaaaaaaaacacgtgaaaaaggaccagaaagaaaggaactccattccatcaacgtcacctttcttttggccctgaacccgccccaattttacctaaccttccctagtctaacccgtcttatttcactcgattcgacttcattggttgaacattctctacgcaaagttgcccaccttctcctctctcattcttcttcctcttccctacttttactacattcttggctcccgggtgtgccattttgcttcctttcccatcggtccttccgcccctccctactccaccccggtttaccacccaaaacggtcttctccccttcacatctctatctatcgccgcgatgtcacaaaatcgacccggattgttcccgactttgcgcatgggtggtaagatatatcaatcgcctttttaatcgggagacaactgaccgcgtccagaggtcatccgggagaaggtccaggatggactgactggcgaatccaaggagatctcctacacccagtgcaagatcgtgggcaatggctccttcggtgtcgtgtttcagaccaagatggctccgagcggggaagatgctgccatcaagagagtcctccaggataagcggttcaaggtaaatcaaatcggcttctctcactctggagacctctctctgtgtgtgtgtgtgttggactaaccccagtctctcgcagaaccgtgagctgcagatcatgcggatcgtgcgccatcctaacatcgtcgaactcaaagccttttactactccaatggcgacagggtatgtgtctcctgggtgtcccgcccgatcgtcttcccgtcccccgttccccgttccccgtgggctgaccgtgcccccgatctccccctcaaatagaaagatgaagtctaccttaacctcgtcctcgagtatgtgcccgagaccgtgtaccgcgcatcgcgttacttcaacaaactcaagactaccatgcccatgctagaggtcaagctttacatctaccaactgttccggtcgctggcctacatccactcacagggtatctgccaccgggatatcaagcctcagaacctccttttagatcccgccacgggtattctgaagctctgcgatttcggatccgctaagattctgatcgaaaacgagcccaacgtgtcatacatctgctctcgctactaccgggcgcccgaattaatctttggcgcgaccaactacacaacaaagattggtgaatatcccttttgtctgcccaaaaccatattgagttctaaccattactgtcctagatgtttggtccactggttgtgtgatggcggaattgatgcttggacagcccctcttccccggtgaatcgggcattgaccagctggtggaaatcatcaaggttttgggcaccccaactcgagaacaaatccgcaccatgaaccccaactatatggagcacaagttccctcaaatcaagccccatcccttcaacaaggtattttatgacccccgtacccccggtccgtaatggtgctgaccgtactaggttttccgtaaggcgccacccgaggctattgacctcatctccgcccttctggaatacaccccgacacaacggttgtccgcggtggaagccatgtgccaccccttcttcgatgagctccgcgaccccaacactcggctaccggactcgcgccaccacaacaacccccctaaggatctccccgcccttttcgatttctcacaacatggtacaatctcccgccctctctagacacaacccccactaatccaccatctagaactttcgattgcccctgaactcaacgcccagatgattccccctcacgctcgcccagccctcgaagctcgcggcctcggcctcgataccttcaaaccccttaccaaggaggagatgcttgcacaccttgattgagttgaccagagagtgtcctccgccctccgcgagggatacgtatgttcgttgtgccgccatctgcactttgcgtgagattcgacctgccaaccaagttccatgatctcgggtaagctctgaattgagattgcactgccttgtcttttttttctttttcgtcggggactcggtatgcctccgccccggacatggtggatccttggaactggaatgagcagggaatggtatgagatgggaaaagtgcatcctttaatggctgggaagcggaaaccatgtttcttcggggtggtaaaggttgatggttttcacgcaatgggaggtcatggcctggagtttattttgaggtgtctgagacagctctcgggaggaaaaagtgataccctttctgtgcacgtctgcctttgggggtcggacactgcatagtttcatcggtcgaggggaagaacctccagacgcagcaagtcgatctcgcctccggaggggtgaatcttcccacaaatgcatcggagatcttgaagatttctttggatacacgcacgtttagggaggacccttctatggtcaatctctcgtcttgcagcgctagaatccccgttcgttcttccctttgcgtccttgctttcttttttttttgttcgcaatatccttgtatcagattcatcgggctcggctggttccccggtcctccgacttaccggccatgagctatatgtcattccagttctcaagcagacaattttctttttctttggggtaatgcgtaaagaatcaataggatttgaacggtgtaattttctagtatgtgaggaatattcaattatcctacattgtctaatacctatgtagtgacctagtagtgtcgttcgttacatgtctggtccgttgagatacttcccgcaggggcaccgggtccggaacttcaatttccccttccgagctccccattcacctcaagctagctgtcaccctcgttttctacttccccagaatcactgtctctacgatagcaatctggtattacactggctcattggattgattccagaacataatggccgaaaacgaccgacgaaaccagggctacaggggtgggcgcaaacgtcgctacagaggtgagaacatgaatctaagcttcccaaacaacacgctaacttggctgtaattcttacagatgatgatgactttgatcgccgcccccaaagacgcagatatgaagagccattgttcgtccaggtgcgacggcagttgttgaccatcgcggaatcggtacgcgcctcgtttttttttttttttccgccgcgcgcattgcgctctacaaatggtggatatgaactaacgcttatgtctcattaataggctgctcgcagagcagaagatgacgtccagggtattgcgaagacagtcacggataactacgacgacgaggagatccgccgcgactttgtcaacatctcccttgatctgtacgtgtcggtgtactcaaccacttcggagtattactaacttggatatctgcagcgttctcgaacaacccatgaaaattccttttatcgccggcacggtcctggtcgcacatggtctcaagcctgagcttggatccgaggttttgagcaaggcagctgaggccttgcagaagtatatcgacattggcgcatggcgtgaagtcaagcttcttattcgctttctgggtattctccagccagtctatgagggtgatggcatcttccctcttctggaagagctgttcgctcgtgcagtcgatcttcagactgcctcttcggaagatgtaagttgggattaatcgacctgtgatgtgaacctcatctaacagcttctagcttcttggccttgaattggtaaagatcattcagttcaccattccttatgtcatgctgtcccccgccactggcttcgaagcccaggcttccgcacttctggagaagaccgacattattgcgtctacgccgcacgccctcgtcgatctggtgaacacattcagccccgaggagaatcaggaggcagctggtcaaagtgttatcagtttgatgcagactcaacttcaaggggaggccaaccggggctgggagcttaagtgcctccctcgtccttggaacgatgtccctgacgccgagacggatgagcccaagtctttcgagtcggtgaccaaggttcctttccccacgatcaccgtgcctaatcctgtaccgaacggcgcgcgtcctctcttcccagaggtctacctttcggtgtatgccaaccaagaagtagacaccgtccctgcgatcacagacatctcctcttcgcttattcgggatgcactggtagacaccattaacctccttgacttcaaccgcgttgctacggccaagttcctgatcgatatcgactgctattttacctctaccacattcgtgaagcgcgccacgcctttcgaccgaatgcgcgagctcatcggagaggtgcagccgtggaagcccgaggatgtggcagtggacgcagtcttctcgcagctattccaattgccagcgtcggaacacaaactggtctactatcactctgttctcaccgagtgctgcaagatcgcccctgcagcaattgcgccgagtttgggtcgtgcaatccgattcttgtataacagcctggaaacaatggatttggagcttagcaaccgtttcctggactggtttgcgcaccacttgagcaactttgggtttacatggaaatggagcgagtggtaagtcgacaatgtcagcttctacacggtgtaatcggtcattaacaatttcacagggccgacgatcttgatctgccctccattgatccaagaatggcgttcatccatggtgctttggacaaggaaattcggttgagcttcgctcagcgcattaagggaactcttcctgatccctaccccaagttgatcacagcaggcaaagagaaggataccccggaattcaaatattcctccgaaagtaaatttaattcgtggcccaaatggcagagaatgtggctaacctgaacttccagtggcaccatattccaaagaaggacaagaactcatgcagcttattcggaagaaggctagcgacgaagaaatccagcccgtcatcaccgccattgaagaccaggccaaaagccagggcgttgacgaccccaagatcccctcgacagatgcattcgtaacatcactctgcttcgtcgggtcgaaatcgctctctcacgttttgtcatgcatcgaacggagcaaagaccgtcttctggccatcggcacggaatcgccacacgcccgctgccaaataatcacctccgtcatggagtactgggtcgatcagcctggtattgctatcaacatcatcgacaagctgcttaactacaccatcctcagcccgctctccgtcctcgaatgggctctctccgagtctgtcgcggcaggaaccatcctcgcaaagccccacatcttcgagatgatctccgccaccgtaggcaaggtcactaaccgcatgcgccagatcgtcgccgcccgcgtccagcccggcctctacgagccccagcttagcgtcatcgacgagaccctcgcgagcgagcgcacagacatgcaagccctcttcaagtacatcgaggactctatcgtctccatcgccgcgggaagcaacgatgagctgatggagcgcggtgatggcagcggcactctccccgaggacgccatcatccgccaatggggtcgtcgctggctccgcgtgttccggagaaaagctgccgtcgaggaatccttcatctctgatgccctggctaacgccactcccctcggcacccaggccccgcctgtttctgtgcgggagggtgctgcggatggagatttggatattgccgatgccgatgcgcaatagagctgtcacaaatatggatgccatctcgatgaggtattagcttatgcatgctgcgttctcgcatttgatctctttgagctttttcattaaatgacttatgtcccggagagcctttttctgcctttttctccattgctcctctgtattgtacactccaactccgggtctttgaatggctgacagaaatatgaaaatctctctccgattattccaaattaacctttctcgattcttctcgagacacaacgaatatgcgggttgccgacctacaccactgaagttgtacaaaactagaaaaaaaaaaagaaacaccccaagaccatgttgattcaaccgtacaaccctaacgcggggatatcccaaattcaaaatacatatgaaagtcttcgtaaatcgtgtacatcttgataaacccaaaggaaaataatgagaaaaagagtgaaatccaactaggacttggatccagaagacaatgagatagaacaataacaaaaagggaattaattgtggaagccacatggaaaccagtaagaaataagaacagggatatcagaaaggggtcatcagtagataaatacaaagcaatataaaagaagaatgaaaagaaatgtccgaaaccaaacccaatcaatgcccatgaccatggctatgaccatgaacatgaacatgaggcttgcgctcaatataataggaatccccatcatcgccatcactgctagaagtattataaacggagaagccatcctcaaagctcccacggcgcatctgcatctgcaactgcatcttcgaaacgccctcctcagacccaacagactgtattcggtccatgaggactcgatccacgggggcacatctactctttgggtcagaccgtctcgtcattgagattcgccggtccttgccacggcccttgatgcccttgttgctgtttttgtatagcccggcgaaatatatccagagatcgcgatctgccgcattcatgttcatcggtccattctcggccatttgtgagaaccggatcgttagattgtggagtgttgctgcgtggaatttgttttggtgtgactgttttgggataaggggttagttagcatgggttggcttaaacggtggtgttgtatggaagtattgatggagggttatcataaggaggacaaaaacttaccttgaggttgcctaactgggtgaactgcttgccacattcatctaaacggcagtcaaaccgtttagattgatcatgggtgagcctgtgagcgcggaggttgcctcgctgagcgaatggcttgtggcagatgtcacattgaaagggtttttcgccggtgtgtcgccgctgatgggtctaggttttagcacacatgtcagtgtctgcctcgtgcatcgcaatcgcctggcgcggcagctggtgatgtgcttaccttgaggttgccttgctgcgagaagcgctgcccgcatgagggttccttgcatatctgccccattcaaactggttagttgctgtcttaaaacatttgattcaatttggatagacatatgacaagtgtactcacaaatggcttgtcacccgtgtgtgccctgatatggatttctaggtgtgttttctgcgcgaagcttttaccacagcctgggagggtgcagttgtacttgcgcttcctccgcgatggctgagtttcattggcagggtaccgcggtggcgttggcgaggcagtcgggtaggatccggcataagtctgtggtgccgggggtgccggatgctggagtgctggcagcgattgctggatcagtaatgaagcatgcttggcctgaattgccttcatcaggacatccacgttggttgagaaggcgagatcagtggtggtttgcttcgtctcgttttttgccccgactggtgaactgtggcttccagtcgagatatgcacccgtggagcatggtcgggagtagacttgattgtatggctgatggcgttcttcgccggacgaatctctggaagagactgcaacggttgtgctgttgtgcgcagtggttgcggctgtaacgggtgctgactatggacaaagtattgctgatagggattcgagtgtgcatgtgtgtgacccacagagtgaccgaagctgtaaggcaagctacttgaggtctggtaatgcagcgagtatgatgctgtttgatgcgaatagaagggaaagttatggctcagggtcgagtctatcgagcgtctgtgtgcaaacgcactcacggcatggccagggaagtcgtaagagacgggctctgaggtctccatcttgatgactgtttgaggtcttcctctcgggatctttcagaaaggtaaggataccttctccctccggatctccaacgagataccaatgtatctcaatgtatacctgtcctcgggatgtgctggggagtttttttttttctgaatagtctttgactatgctctgagacccaatccccggtgatatttgggttctggctggcaacgagttctcagaaagaagcaaggatggggaaaatagacaaaccggccggccaaagcgcaatccgttagatctggatgtatatatgtgagataaagaggagaggaaatagcaaatatatgcaggtcattcatgaaaagcgagaaatataatgattgacaactagtgatgatcttccgcatcgaccgtggcgcctcccgatctagatatacctgcaatggcgggggcgacagggggaggggaggcagnnnnnnnnnnnnnnnnnnnnnnnnnnnnnnnnnnnnnnnnnnnnnnnnnnnnnnnnnnnnnnnnnnnnnnnnnnnnnnnnnnnnnnnnnnnnnnnnnnnnnnnnnnnnnnnnnnnnnnnnnnnnnnnnnnnnnnnnnnnnnnnnnnnnnnnnnnnnnnnnnnnnnnnnnnnnnnnnnnnnnnnnnnnnnnnnnnnnnnnnnnnnnnnnnnnnnnnnnnnnnnnnnnnnnnnnnnnnnnnnnnnnnnnnnnnnnnnnnnnnnnnnnnnnnnnnnnnnnnnnnnnnnnnnnnnnnnnnnnnnnnnnnnnnnnnnnnnnnnnnnnnnnnnnnnnnnnnnnnnnnnnnnnnnnnnnnnnnnnnnnnnnnnnnnnnnnnnnnnnnnnnnnnnnnnnnnnnnnnnnncccccggtatagaaatcgccgggaaggggggggggggagggggggaggggagtcagccggtgaaatagttgaaaagccccatttcgcctgtatgacgtttggtaattcgatttataaaaattgggaaaaaagggggggggaagaagggcagttcaaggccagagatacatgcaactgtgtatagtgtgtctgattcgacgatctccgtgggccggggatcctgggcgattgaggcgacctgactccaccggaaaataatagaaaaagaaaaaaagaattccaatcaaagggacgaactggggttcctggggtttcgtggagctttgggagccctagagagccctggccctgaggccctgaagcactggaggtgcattgcatggtctatgaagatgcattttggacgcatcgattcctgtaccacaaggaatagtaatttctcattagtcgtaatgtattttgatacatttggtgtgaaatgtgtgtcagtcacacgaatatactcgcagccgcgactggcgacgaaagccttcagctcgttcccctatacttcttccatacttccttctctggatacttctgtaactgatattgttgaagagactgacatctgtcagactcataatctcagaaaaagaaaacacgcaaactcatcgtgctgtgcatctcccctcgaggagacgggccgggcctttcaatgaattcgcaagtggaccgtgatcgacctgcagtcgacatgtagattattcagtcgatctcggagtcagcaatcgctcaatggctagctaggccgtaattacgagtactaggatgcgccatcccgatagtcgccaatagcgtccgatctcagcccatcgaatatcctagttagccgcccaaggctttggaaaattcaggctgatctgaatctcctgaagagccaatcaaattgacctctcccatctagtgagatctgtctctgtctctcttttgagccaagtgggagtcgattgtggcccttaataggaggaatcaatcagcacgggctttggattggtgtcgatatatttcccctccccccttaaactgcgaatggcttggctcatgggccatgtcgatcatagctactcgtggtcttagctccatactgggaacgatccgagaaatgacagccatgaccatctgacacgagtaaccctgcacgtcctgcatcgagatgaggtatcgggacttgtcaagaatggttcctgcagggatgcgactagtcctcacgaactacttcctgaatgggcgaaggctagactatgcatacgcattaagcctagctcggtgctttgacgagatttggatcagcatgtctccgtagggggtgtaggggatttgaggtgtttattaccgagcttttgacaaaatattattcggagtattccgtattccgtattccaagtctttcggagtacaaaatgtcggaggctctgtggtgattcagacggacagggatgtagttgggatgagattcagctttccagaatgtccgtgtgaccactgccctttacatctacaacatacatgacaataaaccaggtgtaaagaatggcgattttgaaattgaaaaagggaattcacgtatacactaaagcgcacaaagtgtataaagtaaagaatagaaacaaaattctgcataaataaagcccaccaaagcaaaaacatcatattgcgcccaaaggatcaaccctttcatcgtccagtatacgccgagtatctagaaaacaagtcagcttacgatcctgaaacacactcgggacaactcacctccagattcgtgcacgcatgtctccactgccggtcgcgaacaggttgccagtaggactgggtgcaaccgagatgactattcggagttaaagagtcagagatgataatgcaagctaggattgtatgaaactcaccagagttcttgtggccttgaagcatcatttgggcatttccagtcactgggtcccagaactgaacaccacggtccttggaaccactcatcacccaagcaccgtcgggtgtcaggcacacactgagaacaaagtcctatattgtagtcaaaaggttagcttctgcctatctcgctcaagtaatctcagatctaaccttgtggccctcgaatgtacgaatacacttgccgcccttgacggcactgtgagggtgcatgccccggggaacggtaagctcccagagcttgatagtcttgtccagactgccactgacaaggtcacggccattgggtgcaaacgcgaccgagtaaacactgtccttgtggccatctgggctctctaggcgttctaccaggtatccagttgtagtgtcccaaacgcgcacgctcttgtccaacgagcccgcggctacgtaacggccatccggagacatggccacagtagtgacaccatcctcaatgctaagggtgtagacaagcttgccgtcgagaatatcccaaaggcgcacggtcttatctccactgccagaggcgatgaatcgaccgttgccagcaaagtccaaagagtagatgtcctgctcgtgtccactgaagatatgtttgatggtgcgctggttgatatcccaaacctagagccaatcgcattcagtcagtaatcttcctacatagctggttccatataatctcaagacttacccgaatctgcttatcttcagcaccagtcgcaagatatttgccatccggactgaagcaaacgctgcgaatgtataagtcgccgtccttgtcgacgttttcatcctgcaaggtggccacattttgaccggtggtcacgtcgaagatttgagccgagcggttacagcctgtagccaagtatttgccgtcacggctaaagcgcacacagcaaacgacgctgtcgtggttcaagtgatgtaccagttccacatcgagaacacgctggacctcggggttgaacacggcataccaatcagaaccctcacgcttctgcgacggaggcaaatcatcggggttccagtttgccagcatatttcctggacgttcggctgtgcggccgagaggggggttcggaggagtcgggcgagggatctgaggggaagcacgaggatccgggtaggcgatgtgcgtttgctggggggtaccggggcctgggggaacgcgaccacggcccttaccagggcctggggatgcagtaggaggtggaggcggcccatagcctaggagatgaacaatccaacaggtcagcaaactgggcgacaactttcataaacacaacgacataccgttcacagcagcgccagccggatatcctccaaaggagctctgctggggttgcggcgcgccaggctgagcgaccgaagcaggctgttgaaggggatgctggggaggctgctgatcctggggaagggaaggtgcaagaccggggccactacctggtgggttggtcatgataccgccaaacagattgctggggccgtggcccaaggcaggtgggggagcctgggaaggagctgtatgagccgccgcgggtccgccgatgtgggaagggatagattgcacgccacgggactcaagttcgtgtcgcagcattcggatctcagcttcatagctaaaaaggaaaaatgtaatgtcagaaagggttattcaagctttcaagaaggtaggagggacgaactcttgcttgatcttgatctgcgcctgttccagttgatagaccttctgacggatcatctccatctcctggagctgtccggtcactgcatgatctgtcagttagataacacttcagcgaatgtcggaaaccatggagctgcagtcattgggggaaatgagctgcagctgcttgtatgggggggggggggggggggggggggggggggggtgggggggggggggggggggggggggggggggggtgggggggggggggggggggggggggggggggggtgggggggggggggggggggggggggggggggggtgggggggggggggggggggggggggggggggggtgggggggggggggggggggggggggggggggggtgggggggggggggggggggggggggggggggggtgggggggggggggggggggggggggggggggggtgggggggggggggggggggggggggggggggggggggggggggggggggggagggggggggggggggggggggggggggggggggggggggggggagctcaaggcgcgaatagcccgagcataggggaggggaaacaatatgtcggaaaggagaagataacatacactgatgctcgaattcaccggtgtttcgcgactggctctcaaactcctggcgcagttgatccaacaactccgtcagacgggagttgggagcgggtaccatcccgcgatgagcgttgtacatggtggaggataatttttttcttcctgtctttcacaagtcggagagggacgaaagcgacgttcggacggcaggtctaggtcagcgaataggatcgcaaccaagttttcgacctggactcaatgatcttgatcaccgaggcttcaatgcttggtggatagcaccacgcagctagccacagcgatagtgggcgatacggtataagctggaagatgagaatgggggtgtagcggtaagaggggtggaagaggctggcagctgacactttaaagcgggaaggtttgagtttggggggaaaggcggcaatggttgacgcgtgaagcgaggccatagccgagaagcgcagcgggtcttaccgtaggctactttttaaccttgtatataatactactcctataacaagaaagaaaatgctcaagcaaataacaattagatgagtacttttatacgatacagagatgaaccaaaagatctagttttagttttggatctaaagtacttttgtatagggctaaatacgttcatttatccatatctatgaggtccagatcgtgaggttcgcatgaaactggtattattccaaagatacctggaataccagggaatacttggatctacacccgccggtgcgggcagtggaggtacctctgagtacgggaagccgaagtggaactggtccatgcagtaccaatttagtactgcagctactgtatgtattgtaattttgacttatcatgtgttgattgcctgataagccacaaagtgtattcaggcatcaaggcatcaactgtggcaaaccaggggttcttttaaagtttcctctctttttcttagtacaacgcaggccatgaaggtatagttatgaagtgataggagtgaatttagaggattcgtatagaaactaatataaaataaactactatatactataactccatccactcataagataaccatatcattaacccgcatcagaccatcccccctggatcaattggcttattaagaaaaggtggcatcgcaacggctgtggcggttccgcgctggtatgactactttgttattcgctgcaaatctcctttttcttgttccttcaagtactcctcattcttccctgtctccctccccctcccctcaaccctatctgtgccctcaatcatggatatcattctcgaattatgggacacctttattggtgatcgcctctattcgacacttctccccgcctcgttatcttcgtccgtctcgttgccggcattcgtcaatgcggccgccaacacttcaatggccctttttggtccagaaccttttgtctatgaacaggctacacagatgatttacctggaaccttcgaaatatgcatacctgagtgcttggcccaggaacaacatttaccgtcaatttacaagcttttttctgatcacttggtaatgcgccaattctttcaaatcgctgctttttccgtgtcggtacaatgtactaacatccaattaggctgtttggactgcttgtctacttcttggttgcaacactttcattcatctttatctgggacaagacaacctacaaccaccccaaattcctcaagaaccagattggtctggaaatcagacaggccatggccgcaatgcccccaatgtccctgttgacagctcctttcttcgttcttgaggttcgcggatacgccaaactctacgacactaccgccgacgaacccttcccgtactacagtctcatccaaatcccattcttcatctgctttaccgatttcttcatctactggattcaccgcggcttgcaccacccccgtgtctacaaaaccctgcacaagcctcaccacaaatggatcatgccaagcccttatgcttcacacgccttccacccgctcgatggttggtcccaaagtgttccgtaccacgtcttccccttcatattccccctgcagaagatcgcctacgtcttcctgttcggcttcatcaatctctggaccgtcttcattcatgacggcgagtacgtcgccaacagccccatcgtgaacggtgctgcctgccacaccatgcaccacttgtacttcaactacaactacggacagtttaccaccctatgggaccgcctaggtggcagctaccgcaagcccaacgaggagcttttccgcagagagacaaagatgggcgataaggagtggaagcgccaagccaaggagatggagtcgatcctcaaggatgtcgagggcgaagacgatcgcagctactcctccgaaaaaaagaagaatctttaaaacgacggcgctaaatcacattctttacgacttcacaatgcttacttggttctagactacagggatcaatcgagggccactacagacttttcggtagacgagctgtattcttcacctgtgttttgggttgggaattttggatctccccgttggttttcgtgccatttttacgctaattcaagtacattaattcgccttttgcatctcttatgtgttttaatactcccaaaactgaccagcactcttggcttgctggtccacgggtagtctaccctattctgtatataatgttcctttttcttcttttcttctttcttttttccatgggtgatacaaatgcacttgtttagttctctctgtgcatccttctacgtgttcgcaaatttatgtgatattattaagaccgaaacagattcgtatgtatgatacttttataaacaagaaataccagaccagttcaaagttacataattggaattaatattgggaatcataatatacaacttccgtctccatcaagtactccagaccctggtcttcccgagacaaacagtatgattgctgccacctgcgcaggccttttgatgatggtctgacataggggaaaaggctcctctcctctgatggatcgagaatgatgggcacgtgcgctaccggagagttcgtatgatgacacctcgtgatccgtcagtctcatgaaacccattatcagccagatcctgctctcggctcggccagacctccgccctggactgcccagattcagccgaagcaagtcgcttgtgaagagcaaccactcgattagcctggtgagaatccccacactccagcaccgtgagcttggccttcaacttcaatgccagggtaagaatgcggtggtagaagatatcctcgggcatgcagtcttccatcccggagcccaagtatggaggcacaagtgccagcttgggctcaaagcgccgtacactgcgtgcagtggtaccgttgcggaagtccgtttgggatatgtagggcgggttggagatcaatagatcacattcactttcttggtcgggtgatgagatgtccaatgctccgagattggggtgttgtgtttggagcattgactcgatggacgggactgaattgtcactgttatgtccgaggacatcggcgcgatagaagtgtatgtctgtccctgcacggggtgccaactggcctagttgcaggttatgctcgagattctctcgggctaggtctaaggccgtaggactgatatccactcctgttatctctagctcctggaaatgaggacaaagtaaggcgtgcaagagaagtggtatgcaacctgttccagtgcaaaggtcaatgacacgcaaaggtctcgcctgattaggagacttggacttgtcattatggcccagggccatttgacggaccaagttggctgcttggtacgtatacgattcagtttctggcctatgaatgcttgtcagtaagagtatcgatttttaaagaatctgataggcagaccttgggatcaaaacacctcttcggcaaagaatctccaagtcgccgaatggttgatctccaagaatatattggagaggatatcctctagatcgcatgcgacacatagatctcaatcggcttctccatcctgcctttgatggaagagactggctatcgcgaactgcccgctcgcgtagccaacgaagctcattgcgagccgaatcgattgtgcgacattctttaaggagtataggcagaagattattttcccgttgggcttttataatgacagaaaaggggattcggggcattctgggaattcgaggaggtggtcagtcggggaacgttggtgccaagggatgcctatgccaagatatttacaaatttatatacaaattcatagagatctatgagatttaagactaaggattgtaaatatacgtcagttaaccataccagttttggtcatttacattagagaaggactcagttgcttttgctttgatggcttcttcatccctagggatgtggtccttaggatggcgttaggctattgttgatctgcgtggtcgaagggtgtcattgtgaatgtgcagagaattcactttctatatattgatagatatgtaaacaagtgagtaaatgatgaagaagatatctcacacatctagaaggccttcatgtccatacgcgtcaggactcagcagcccctaggctagtctgaagagagctgggagaagtgaatatagctgtaaggatatgtatacagacagttttccacatgcacatagctatattagatcaaaaataggtgctttctatttcataacacgtaagaactcgataattgagagtacggacaataattttaggtatagcctttccaaaccccaaatacaccatattatgcgagacatctacataagaagaaaattaactgatcagccaaatgaaccctagcggttttagaaagccagaagagctcccacgccgacaaggccgacagccatgtgtttcggcatagcggtcgccataggaatggccatattcccagtgacagaggaggtgccggaaagtccggtctctccctgcggtgctccgattcgagcagcggtgccaccaaccgacgcggtagtcactgggttcgatactgcagttgcaccagggacggaatcagtgccagtcccgatttccaaaacatcattctcggtggtgttgaagttggtgttggcgagggagatctcattattggcgagatcgtataccacatatgcgctgcgaaggaaggtatctcccaggactgccgtgctggtccccgcaggaacaataccgaaaacgcaggcccgtttgccgttccggaaatagagatcgccaacatcgatgatcatctctttgatttccacactgatcgtcggggatgagaatgtgtaaccgagggtgatgttcttatctgccatgctgcattcaacatagccaatgccactgtccgactcgtaggagacactgagatcattgtagatatcctgaaccagggcgtccggaaggtatgtaagagagcttcccgaatccagcaacacgcccgcaggaagggcactggaagaataggtatttttgccggatgaattggtgagggaaagtccagtgagcgcaatgatgaactccgaatactgtccgttgaccttctggacgggaactgtttgcagggtgccgtggtatttcttagtgttgactccaccaaacaaaatcgagcctgtactcgcatccagatcgttcagccagagactgtaggcatttgattggattactcctttgctgaccattgccttgggcaggttggcataagccgagtctccatttctgccaacctgaacttcattcgtagtatatcctatacccagcacaccctctgtatacagacatccatgttagctctgtggtaatcagcgttatatccgacagaaatcactcacccgaagagccagaggtaaacccaaggccaaactggaagtctttaatagttgtgcctccaatggtaagggtgtcggtgacatagtctccggcggcgccggatccatcggcataggtgatattgaagtccgagttcacgaatgaatatgaagaggaagagctcgagttgtaagtaccagattcagcgcaggcgtctttgctggctgcacagagagtcgaattcggcgtattgcaccacaaatcactacttccagtgtcgagaaccaggcgtacactctgctccggggtacccagggtaatattacagaagtataaagtttcctaggcagacacattagcagctgcgtaagaattatatataccaataaatagatatataaatagatatcatgtgtacctcattgtccaatgcctgactgacggtcgaacgtttcctccttgcttgatctctagcgacggggtcgagaatatcctttcgttgaatatccatttgcaccacggcggggttatctcttcgatggagggttaaaccccagactggcagcgccaggccggtgaccaataagacccaagcatttttcatgatagcgtcgatcgtcctccccgtattccgcaagtaagggatgagctattcgattttttgaacttcagagatgacgtcctaggtgggggtggttttgaatagagtagcaagtcaagaggaaagttgaagcaaaagagaggtaaagagggaaaaaaagaagaaacgggggggaagttgatatctttccacaaatgactatggagctacctagtcggctccagccggattctcaggtggatcatacgtacaatagatgtattttatatatttatatctttcctgttcttctcgaagatgaacgggtcaggcgggaactctatagtgctgtcgtcaccaagcataagtacaacgtaagtgtaaacgactttgtatacatatatatgtagttgatctaacatctaacataaaccaagtctttaacctttgattcctaaattcaacaaatcatgactttgtacttttcagcgtacgtacgcgatatacgtggtggaggcgatgacgcggtggactccactttcagccccctttgggctctaacggacatgactctaatacttacatattgtacatctcactaccttcattatatattgtaaagtcgaaaccgcctactcgccacttacagacccatcgcatcccggatttgctgcatggtcatccgactattggcccgcgctgcttcggcgccctcctcagccaccgactccaagtaccctgtctgatcatccatgatcgtaatataccgatctcggatttcttgcagatgatggatgattcgatctgcaacgtgttccttgaatgatcgaagacttgcgttgtggaactcagccgcaatatcctcgcaagatacaccctccaggtggcttaggatttcgatgagattagacaccccaggccgacagatcgggtcgtaggtgatgcttgcctccgagtccgtcagggctaccttgactttcttgcggatctcggccggtgagtcggtaagaatgatccgggatttcccatcggcgtgcgatttggacatctttgacgtgggttccttaagggacatcactcgctttgcgggggctggtcaagttaatgtttcgttctgttcgttctgttcattcttccttcgggtaactgttatcttacatatcaatgcctctggtatagggaagatgggcccatagaggtggttgaagctattcgcagtgtatctggaaaactccaggtgctgtctttggtcttctccaaccggaacatgagtcgctcttaatgatcattagcaaagaacggccaatgtagacgagaaacatacttgtgcaaaagaatatcggctgcttgtagtactggataggagaaaagaccaagtcgaagctgtgcccgtgccgttgaatcatcaagggtggcgtcgtctggcagctgtagcttactctggagagtgtcaataagatgctctttctgtataaattacagggccgctcaccttccactgtgtcatacgcgacagataccccatggaagccaccgtgctgagaatccacatcaactcggtatgtgctggcacctgatgaatgtcaatatgaaatcccgattgtccctagcagccgacagctataagacgagaacctaccccggactggtagaatattgtagagcgcttaggatcaaggcccacagcaagcaatgttgcaaaggcctccttcctccatttcttcaattgggctgggtcttgtggtaccgtcaatgcatgcaaatcaacaatagagaaaaacagcttggttccttcggttgcatcttgttggagcttcacccattgatgcaaagctcctagataattgcccaaatgaggcacaccagttggttggatcccagaaaatataacgggctcttgtgctggcggcgtaatgcttgagctgttccatcgatggcatctccttggaagaagagagagcccgcttggacggatatagagatgttttgcacgcaatggcctcggcgaggcaaattcatgacgcatcgcgttagcagacatctccaacaaacgctaaatcggtgcgagaatggaaagttttaggtgcaattgcttcggactgccgtagtccccaataaccaccgaaaaacgcgaaacgcgagatttatcacgtgatcaacatcgtacaatgactcgtaatattcaaatttcgcacatttgcagaatatgcgagcagtaacacgtctattggggatcagttgtggcgagtaacattcagtatatagaaactttctttcatctgggcttaaatgagaatagtaaaacagtaaaatacatatggcctagatcaagaaggcttttgaatataatggaaacagcgcctgcagcaaagacagcaagtccggatgttcacgggtatacaagttcaacagtagatcgccattccatctatagacgcttgcgctcggcgaatcgctcattgttcaaagtatcgaatatcgtgcccgggcccgagttgtccttccgctgaccgaattgcgcgagctcgggacgaagagcttcttccacctcggcaacagaagcgtccatggccttaccagcatctagtatagagtattagtactctgctcatagaagacaccagccaggcgaaaaaggaaagaaaaaaagtgtaacccataccgagactgtcatgttcccagacgtttgccttcatacccactccataaaacgcatgcttccggaggaatgcaagccatgcctgcaccgcttgtgggtttccatccttgatctgaaccagtcgacggagggtgattcgttcaaagttctcctggctctttttgtgcacgaagttacttcggggtacggtccagcgttcgacgatgcgagggagaggcacaggcccggacacaggaagattgaggtagtacgcggcacggatggcaaaatccgtgaagaactccacgttacggacgctgtatgatcgcaattgaaggtcgcagactgggaggccgtactccaccttcctccgcaaaggccttaggtatatggcttgcacgctgcgtggaagtcggttctcctcaccgaatgctcctaaccgttcagacctaaccgaactgtgagcagtgatctttgatctatttcgactctgagccaattgccttggatactgaccattctttcaccttaggctcggtaatttgctcggcttccatcggtctgcaatgtctcaattagcaacaaagccgaatcatcctagatttgaagggtatcttacgctactggagcaatcgatgcaggggcggtagcggcgggggtagcggcgggagtcgcgacgggcgtagcgtcaggtgtagcggcaggtgttggggtcacaggggcagcttctgcaggagcagctgcggcaggtgtcgatgttgggtcttgaacgggtgtcttctcttgctccggcggagttggttgggttggggatgatagagagcggaatggcacaggcaccttccaaggagctgttagcgtcgaaattgtgagttaaacaaaatgagaacataccctgaggctcgtgctcactccaattaaggagcgcgatgtgtatgagaacattgttaatcgtgattttgaggaagatccgttgttgttagcggatgggttttttcggcgagcgagtccagggcggtgagtggggaacttggggatatagagaagggaccgagacgactgtctccaacggacggtgataactatatctcctcagtttaaatataattaggtcaatgataatccatacgaactagtgtatcatcttttgccgttattatataaatacgtcaattgtataatagtataactgaggttgtgcaaccaattccccatgttaccgtatatagttatagatgtgttctcttgtaggtgatcatctctcttctgacttttagataggatgttccattcaatgggctcaatattagtacatttgacatggctaatgtagtaagtatcccccgaggctgcttatctcgaatcctctccagtatgaatccgatcattggcacccccgccaaactagcgacctgggcaatggaaccatgtgactccgcacttggaaacatcgctttctttcgctcatccgatttctcactttgtatatattctacttctttggcggtttacgacactgaattctgcaaaaatgacaaagatagacctatcctcgttccagcgggcaaacgaagcggttttttatctcagagccaagttgccagagaccttgcaaaggcctcaggtcgcaattgtatgtggctcaggactaggagggcttgcagataccattcaacccgagtcacggattgaattcgactatgcatccatccctcatttccctcgctcaacaggtcggtcacgttcttcgtccttagggaagagtttctaacattccgcagtcgttggtcacgctggaaagctggttttcggtcttctcggccaaaaaatccctgcggtgttgatggttggccgtgcccagtcagcttaagccctcattctgcttgtaatatcacaactgaccttggaatagttactacgaggggcactcgattgatcaggtggcattcccaattcgagtgttcaagcggttgcaagtggatacggttgtctgtatgttctacattacccttaataatatgaagattgatgttacagaaaaacgagaattaatgttgtttggtagtgaccaatgcggccggaggtttgaactctgagtatgctgtgggggatattgttctattgaatgatgtaagagaaaccgtcaaatcctttgagcggagttattctaacactgggttacagcatatattcctcgcaggtttggcaggaactcatccattgagaggacccaatgaagaagaatttggagtgcggttcccacccctgtctgacgcctatgaccttgatctccgtcgccatgtgcatcagtcatggaagaaagtcatatcaccggaaagcaagagaaagttgcacgagggtgtatatgcattttgcggaggtcccacgtaagtcgacacaacacaatttcttttgaatcttattctgatagcacccaagttacgagacaagagccgagagccgcatgcttcgaatgcttggtgccgacgtggttggaatgtccacagtaccagagattgtcactgccagacattgtggtctacgagtgcttgcattcagtttagtcactaacaaggccgtcttatctcctgtgcctcggggagatgataatttgcttcagaataaagcagcaggagaactgagcgctcttctggaagagggcatggcaggacacgaagaggttcttgaagctggccgcgcggcagccattgacatgcaggtaagatcgttgcatcaatccttggaagacgatgaaattgacatcgatccagaaactggttgtcgaaacccttgtagatgtctttgatcaagtgtaagactgggcttgacacggatgaatgcatatgatgatctcagaccgtgacgacctgggtccaacttattaggactctagcagagacaatttcgtcgtgtccgccacggccaacatggtgttgttgttgttgttgccattcaaggcataattgacaaaagtagataccgaaatctcacttgtttttccgggttctctttgccttcaggtccttgtagaaggacttctttccacttgatttgctggcttgaatgtccctatatttagattcaaagcgcttggtgccacgctcgagtgccaatgtttcatcaacgaaattcttcttgcggtccttcttggtgatacggttgctgaagaactctgtagggccctcgatgatggttccgacctgggaatattctggtggtttggccttgccattttccttcttgtagtgacgcttgggatcaagcacagaacgcatccgaatgagctgtagatctctcttaagctctggggtcatttctgtctttgggaggttgaaccactcaggtccagcagtaggcttgtcctatcaaggtgagggttgttagcaaatagctacaaatgtcgcacaccgagaaaatatagtaattgtgatgaatgctcagagtaactatgaataaaaggctctcattggtgcagcacagcccaagacggactggttacgctgcatcaagcgcttcgcgttgggaatattttcctcatagcaaaaaaaaaaaaggaaaggagagtaagcaaggacgagattgactcacggtgttcgctttcttgatctcaacagtgcgaagagaattagccaactccttctgcttttggtcggtgatctttgcagcatcgacagtagcaacatcatctccctggacaatatatgattccagcgaggacccaggtgacaatttcgggatcctaggaggaggtaagcctagatcctagcacattgatcttcaacatgtttccatacctaagagatgccagatcatcaatctgggtgcttggcgcattgaggccctttagtcgagtctctgcctctagaagcaactgctgaatctgatcatcggtcaggtcttcctgaacatccgacacaaatgttgagtcagccatccctggtgaatagggaggacaaaggctcaagaggtttaaggtgagtggagagaatttatatttttttcttaggtttgcttgctgcttcccggggccggacaaacgtttatgagaaatttctgcttagtgcgaaagtggagttggtatcatgtgacagaactacttctttccaaggtacagttacaagtacataagccgtttccgagcgaagggtcaagtactgttacttatgcgcgttgtactccccgaatagtacagctcatgtattgaaacgttcacctatcagagctatttgtctaaatattcttcccagctctggagattatatacattgcaataaagtaaaacaatgctttacaacaattgaactattttaaattagacctgattagatgcaataagaaacccatattactatcttggatataaaccccccatatcacatccatacattgtataggtattatacaacatcgagctcggaggggtggccccgaggaacgtcagacagctgaacacctctagcttagcacccaacgcgccttgacctggaacacaacaagcttcatatagtctgtgactgtaacactcatccgattatcgattttatatcgcgttcattcgttctttgttcttagatcctccaccccgcctcgccgtatctcacacctggtcgcgtcgcatcctctcggtaccgcccgatacaccccagagtcccatatagctcaaccccaaagcaagcatggagcaatctcctcaaggctctgcgcagcagggcagacaacagccgcagccgatttatgatgttagaaatgggggtcattatggtaagttccaagtttgtcaatgcgctaaagctacgcgccaaaacctggtttagtcgctacctctcggctacacaatcgattcaaatggaagctgacaacatccatcatttataggtgctagcgcagcggtatgtccatcgcggtgagccacgcgggtcttaccaccttcactctacgatgatcatgcggaatgtcttgagtagcaactaatcaagttgggtaaaaatagctctcagcgcaaggttatgcgccagtcgccgagttgtacactggtacctgggccaacgtaagctcctgagatgaccagacaaatatcgagctctgatactcacctgaactaggtaaaccaaggccttcaaggaactgcacgtgatatcttgacgacctactggcaacatgtcatcaaccatctggagtcagacaaccatgactacaaaatccaccagttgccattggcccgtatcaagaaggtgatgaaggcggacccggaggtcaagatgatctctgcagaggcgcccatcttatttgctaagggttgtgatatttttatcaccgagctgactatgcgtgcctggattcacgccgaggacaataagcgtcgtaccctccagcgatccgatattgctgccgctctgtccaaatccgacatgtttgacttcctgattgatatagttccccgcgaagaggcgacctctcatgccaagcggtcgagccaggctgccggtaccgccccaggaccttctgctgcccccggtcagcttccccctgccccgcatggggttcaacagcaccaacatatgggccctgccgactatgcccttggccagcacggtttgcctcaggaacaggagtaccgcccgcaacctggcatgtatcccggagctgttcaagacccaggtgcggcatatggtcagcctcaatcccaaatgttcgaggggatgtacgcctacccgcatctccctccccagcaggtacgtagttgtatatctcatcttcagcagacaaaactaattatgattgtcaagtgaacctgatatcagccaatggtctagtccgtcatttcaatttagttcatacgcgtttcaaggcgagttttggtctattttctttttttattgttcttatttgattcttctattgttatattttcccacgcacggcaatgacaacgctgtagagtggtgattgagcgaccctgatatttctgatatttctgatgtctcgggattattttatatgcggagttttgatcctggccagaaaagaagaaaccacatgtgacattctgactgttgtgtgtgacttactttgttgattgttagcagtatcatgtatattcctacatcttgtgcaataaatcaaatctacctctcttgcaggttttggagtaagccgaggttacaatctgagagacaagagacatcctcagtatatggtaggtatgcttctagctgtatttctggattcccaagaggtacttcatggttgtagtgaaacattgcattacccacaacacaccatggattcatccagtcttcttgaagcgggatgaaagagtcgcaaacttatccaccttagtaggggcttgaacactccgtgtaagcctattcacaaacagttagtaggtagttcatagcaatgagatatactttcgaatcgtacttttcaagcaaaatgggcccttgcatggcatcaacgcgtccatatttcttgttcctcgtggaaatgtcataaaactcatctgcgctgtccgcttgcatcaactgtacggtttgctgtaactcgtcgaggttctcgcgaagaattgggacatttaagctatccacaaattcggcaagatattcaacatcttttgccaatgctgcaactccgttggggttgatttttttcacatctggggacagtggttgcgcctgtatgatctgtcagtaagtccctttttcaattcattggggttcatagaaaacccaccaaaatcatgttagcagcatggctaagggcatcaaagtagatgagctctttgatttccgtcggcaaacccaacaatgtggagttcatgatgttggacaaaaatcgagtcaaggtttgcatgtaattgctcggctctgtgggaggtgtagaagacatccactcatactctgctgtctcgataaggtcatcgattttggaattgactacctcgaagatacgcttctcagctgccttcttgttgcttttaaacttttcagtagccctcaacgcgattgaggtgccggtggaattctgtgatcgggctgctgccaataagagttccagctcgcggcaagctagctcgaagtgttccagattaataagaatctgaacgatttggcctagatattgtgaggaaagacgctctactaaagtatcacagactttttgtgaaaggaggtcatccagatcctgctacattagtagtcgagtcacgggtcttgggtgtgttggttcgagctcacattcttcagtgtctcatcaatcacatttgtatttgcgaaaccatcatttgcgaagaaatagaactggttcaggaaattgcggatgtcaatgcaacacagaggatacattcgggaaaatggtaggatgcatgggaatctaagccaatgatcagttagatctgaataaggatcaactggcctaggctgattcacaacttacacttgctcctcacgtggttgttcggggttgtaccagctgacgttgaggaccttgtcatgctcctcttgggtctgtatgggcatgggcatataatcatccgttgatacaatctggcagtgtcagaatttaaaatagatcgatggaagggaaacagccctacctcctggaaatcatcactgaatctcttcttcagaagttcggcatatttgccaaagagtgtcagcaagaagtcatcaaagacccgcacggggaagttccacgtctattatatagtcagctatttcagcccaagccaatagagatgggcttgcctacattcatcgtctgcatgaacagagcaatcagattcttgatgttgagaatgctctcagcgttgtcaacttcatgaagtgctttcgatattaacactacagccgcttggcacatcgagtcccacagctcatcaatctatttagcataggtcagataattcctagaaggtccctccttgaaaagaggctaaatgaaaaaaggatatggcttcttacgtcgacagatgacctgagatcgggggctcttttcattgtggcccgttcgacaatggcaaatccagccatctcttccaagagattgtgcagactagaaccatcttcatcaacaagggtgatggaagacggaagcaagagctccttttgtcttcgacgggtggtcgcgtattcaattcggaatttatccatatgtcccaaagattgatggatatgcaagcactcgaacagcggtgtgaagtcgacttgcaggtcttcattctggagcaggtcatactcttcatcttcatcagacaccagttcgatcgcagagttcaaattgaagtgttccagataagggattttttgcgctctttgtttttgtcttgttttccgctggtctgtgtggaaaagcgcaatttccccgaggtattgagacatttctcggatgcggtaaagccaggtgttgagatctgacatcactgcttccgcaatggccctctgtgtcgctggaactgagcgttgtatcatgactgcaatcttgtattgtgtcacccccttcagatggacattttgcaattcctccagcgcccgcagcgctgcatagtggttcttctttgccaagaggtcatggacttggttggctagacgcaatacctccaaacaatcctgaatggcgcgactggtctcatcgatgttctgtcggtggccacgcgactcgactagtgctttcttctgctcggctagacgttcggtactggtttgaatagactgattcaagtccagaatttctcctgtcaagcttactgtcccctctctaatccgaaggagtgaattgacagatgagacaaactcctggtgatttgtgttgcatatactttcgatctcggactccttgtcgcccgcgaaccgggacagtgactgcaggagttgtggagtgcggttcccaacactgtagtctctgattgagggaatgagctggtccagatagtctgtgtcagagggtgagataataatctatagggacaagaagtcagtttcgtttaggtacattctccatgttgtagaggctggctcacttggttcaagacatgtggctcattgagcattggagccatgggtggcataatggctcagcttcatagccagcgataagcccaatagtctcaatacttctccacttgcagcttgcaaccttacatgtatccagggatgatctcaagcttatgttactcgttgacgtccgtaggcggtcaaatgttcgatctgccgctttctaaaaggctaatcccactctgtactagcgttatcactagcctgaaccttagccatatcaagtgtataacaatcttccttttccttccttttcctttttctatatgccatggtctctttgttctttagcattgttctaccacaatttgctcaatattcttagcagccgagagactatgggaccaacgcatctgataaccaccttatttacaaagtaagacagagagcagtgatctcccacactgttgacaagcgacatgaaacttctcattgagaaagatatgaattggatgattgtgatttactatctatggctggtctgtaattgtgaacaagattttttactatgatagtatcgctgatgaaggatcacagcgagtcattccacgggccttgtatgaagattggagacactgcgatagtgaaggctactagagaaccagcaagataaaggacgactcgtgcgctcaactaggctatattttactttcattgggggccaatcattgaattcttgttgggacttcgttcgttcgtcgttcgttgggatctattcagcaatatcttggtcgcactttgtgagtcgttctgctgcgctgtggtcgaactcaatgagtcgctctgtcgcggtatcttgttcgcacgcaatgagtcgctctgccgttgcacaatcacatcgtcccattggttctctcgaaacgtatcccgagtatgagtcgcggtcttgacatataaaagaactgtgcccaccaacgattcctctcttctcttttatttcccgtggctcttttttttaaaaataatcttgctgccatttactgctactttctatcactagggtcacactgccctttcctcgctgcttggactgaacaacttgctagcttgtatgtctacatgtctttctaatatgactctcgattcctgaccttctcattgatttagtattgaacatggaagggtcttctccaactcgaggatcgccatcgaagcagcttactgcattcaatccgatggggtatgatgctttcgctcaccgagccaaccctggctcccttcctggaatggcgaccattcgtccgactaggtaggatacttgtcctggttttatatattgatgatccaagccctaagtacgttaatgtgttatagtgatccatttgctggttggatcgatgagaaagggtctgcgcctagcatcccttcgtctcaaactaccactgcaagctctgcttcttgctatgcctatccagtgcctgctaccactgaccatgcgaacactcgcatctcaggcaacgagtacaagtactcgcctgtttcgcctcgggtgacttgcacccaggcagctcgcgcgtcaattggcaaattccagccctcgcctgtctcaccccaggtgtcccctgcaggagctggtcccggtggaatgctatactcgccttcccatgcccaggcatctcggtcactgaatcaaactcaatactcgcctcattcgttgactcgcgctcaggcgcgtttggcatctgagtactctcctgttcaggcaggtattgccaatgttcggtactcaccatcccgtgacgacattaactatgaatacaatacgacaccggattttttatctagattgctcgcagccgctgattctgcagtcggagataccaatgttgcctcccctaccaatgcactggcccatatctcccccagtaaccaagctcgtcgtgccactggtacaaccgacgcgtctccacgatctcccgccgctgggactaatgatgttgttgagaaacatcgcagctttattgtgcagcatgtccctctcgacaccccccaccgctctattgctatgatgttcccggtaagttacaatatgatctcatgggatggaccaaagctgactttaacaagatcgaggaatatccttcccttgagactgtttgtctcaagcaccttgaggctaggggcgtcttttctttttcgtttggcgatcttcgggaggctgtccacgccatgaacaaaatccgcctaactcgtcctagctggcgcgtcttcccggccagttacgacgacattgccactttcaatggatccaatggatccaatggagccgtttcctctgtctctgtgcctcagggtggtgcatttctgctttctgtgtacaccatcccaagcaagtggctcgtggaacccgtggaagagattgtcaaccaagtcgtcgcttcccttggcaccctgcgctcttgcaagcttaccgagaatggaacgagcatgagtcgataccaagtcgaatatttcaacaagcgtcatgcagcttatgctttttcctgcctcggtgggttcaggcttgatgtatgttgttcctttttttcctttttcacttgcttttgtgttctttgaaatgctaatattgggtttctgcagagtcttcatttcaatgtttctattgatgcacgtgaagaggttcctgttttgcctcgctatcgaactgccagctttggctcccctcggagccctgtgacaccgtaccacctcgtgtccaaggagaacgagatcgacgagaaggttgacatctctccagtttctgatgaaggtcagacgagtggagagcatgctattgaccttgaccgaatcaaacaaggactagatgttcgcagcaccgtaagtcttctcccctctgctgcaagaccggtttctcacattttgtctcgttacaggttatgatacgcaacattcccaacaaaatcacttcggtatgattatctccgttatcttatgaaaatcaggaaggctaattctatcattcaataggaccagttgaagaccatcctagacgagtccagtcatgggaagtatgacttcctctacctgcgcatgggtaagtgcttctccatggtttattgtcttgttcatgctaattcgacccacagattttacccatcattgcaagtaagttctgattgcttgataattgttggcttccaattttacttaccatttgtccttctagcgttggttatgcgttcatgaatttcgctgatgtgagtattttttgctggccttactttcgtcaggcatccttttcatctgatgtctcttttttctgacattatactaacataatttacaggcaattgacattgtcaatgtgagttataccatgtatcagtgtgtgacatctacttaccaattttccttagctcgtacacgctcgagagggcaaggcttggtatgctgcttcctatcttcccccaaaaagtgcattttcgctgactcgagacaattacaggcccgactgcatctccgagaagatagctcaagtttcttacgccagtttgtgtcccatccatagtcagtgggaatgatatctaacaagtttcaatagcacttcaaggtagggaagctcttgtgaataagttccgaaacagcaacgttatgacccgtcctcatgaagagcgaccccgagtaggtttaagctttcacctcccccccccccccccccccgcccccccccccgcccctccnnnnnnnnnnnnnnnnnnnnnnnnnnnnnnnnnnnnnnnnnnnnnnnnnnnnnnnnnnnnnnnnnnnnnnnnnnnnnnnnnnnnnnnnnnnnnnnnnnnnnnnnnnnnnnnnnnnnnnnnnnnnnnnnnnnnnnnnnnnnnnnnnnnnnnnnncatgaagagcgaccccgaggaagtttaagctttcccctccccccccctccccccccctccccgattccggtgccggtattgactgaatatagctcttccatgtcgatggcccccgtgcaggcaccgaagcgactttccccggccccaatgatgccagtaagctccgtcgttcggttgccagcaccactcagcaaggtaagatattgtgccctttggcttgtggacgtattctgaccctttcacaggcctctattcaccccggaaacgagctcccagtacacctcgctccaaccgcacgcgtcctcagtctggatccttcaaccagactcctcggtcccagcccttgaaccagactcctcggagtcgaccatcgtcgatccgcactccccggcagtctggcggacgctcggtccagcatggtcctggcgagttttctccgatgaagtcatctccgttgaaggcagaggaccgtcaattcaagccggagaaaaattaagctcctcctacaggggctatgcgaacgggtcatactgcagcaactggacatgacattctgtaagccaatggttcctgaccgatcagattgtttcatacttacacaatgacaggcacagagtctcgcgaccgctttgtttattgaattatccgacaaaatccaaaaaataacgaaaaaagaaacaaatccgacagatgatgctacactgacaattgcatcctcttccctctttgctccttcaacatcctcgattgttcctctacgccacgacagagggactcattcagaggcaacggcaaagggaagagttgctcagaatggctctgtgcaagccttgcctactcgctgtttcaaagctgagattgcacatttcgatggtctttcggaattgtgcctttaattgtgatctctcacgattcattgctcgagcttttttcccagcttttttccttttcatggcttctgcgtctgctttttattcttactctttctatttcgaaaatccgaaaatccaaaaacaggggatggagttagtcaaatgaaatgaatagttagttattgtctcccagtcacttacaaagtagacaggtaaaaccgtagaatccacgggaaaatcttttcatcttttccatctcaccaaccatggactccaaggaaattctggaagtccactcaatgctacatctgatctttcatcgcaacaagaatcaacatcgccgaacaaaatggtggaaatggctatccatcttgaaacgcgccactttggattccgcccgatcgggggtgaccactcatctggccacgcacgtaatcccaagatgttacatgtatgataaaaagaaaagtcctacgtggaaaaatcaagctaactgtattcttagcgctttctcaactgtcgttaccgataaccagttctcgacccttggaatcgtacttttagctgcgttggcccgactgtccaaagtcaccgggatcagtcaccagctgaagatgcaacctgtgacaaggtccaagattgctcctgtcaagaaagatcgggaagatcttggggaacgcattcgtcgcattgacaatacgccagtcaccccggtcaagatttcccagtctgatttcaaggtccccaaggcctccaaggtttctgagaagcccacggaaaggcctacagatgacgctgtttcaaaaagtacatcgaaaaagaagaagaagaagaacgctattgatgacttattcagcggtttattttgaatctcatacccctcttatgtacagtgttttcttttcttttgcggattccaagggatgtccaggcatgtattttgaagctaaaatgtttatgaagaatgacgagatcgcgatcgagagaaaataacctcgcccaataaattgacaccaacatgattggcagtggcccacgccatactgtagagatacttgggcgagaaaacggtccagatgaaaagatgcgtccggagggctgtacaggcggccatgacagaaaccaaggacacggcaacatggaatgtcaacagtgccgaggggtcttgtcctacgggactcttcggccggagacgatggctttgtgatgcccaccagataggccctgcccagttgctcgcaaaggtgagaactcccaccaacaccacgctgtagctgtcaacaccgttatatccactagcaaggtctacagaggagattgcattggatccgccaaacgcgaagaacgtcatatattggaagatcaaggttgtgattgtcacctcaatccctgtgaggttcatggaagagagaatgccggcctggattcggaaaatcaggaacagggggacgttagtggcacgggactgcgtcattaggaagatgtgcagagcttcatggattgtatcatatggtactacagagtctggtcagtaatgacctccaagctcagaggcaatctagcgcatgtgtgggcttacctcgggggactcttgatcgttttccggcaaagagcgatagtaggacaacgacagcaagtccgtaaaacacgagcctggcatgcaagaccaatgatagactgtagggccattccttcatgatttgcgagatgaatgtcccatcaaggagttcgggcgattccgaagtcacaaagtgcaatttgaacgtaaaggccaacgcggagggggccaagacacctagcctcaataatccagggattggtatactcccgagaagatgacgaccggcatccacgtacgcgaggataaaaagaccccagaagatttccgggtggcgtgcaaagaatgtgcgagcaatatcaggctcggccgcgaatttctgaccagtttggttccatcgtcgcaagagccgctgggtgatggcgagcacaagaatgatacatttgtcagaccaatataataataatccagagcgtttgtgtgagagcggctttgcagacgattgcgatttcatgtgcaggtagacaatccaccccgagcagatccaataccagaactgctgctcttcttccacatagctactagcaaacatcatcatcccacaggtgatgatcataagcgtcaaaaacatcccggaagatccgtgacgtgtgcattccttgtatgtggccggaaggacaagcaggcctgcaatccccgtgatcaacaagcccagaatgagtctggagacatcgtagttactggcagtacgactcataacttcctgtgcaatccttaaaaattgcagcaaatcggggccagctgtagagtaagaatcatctgcttcatccctacctgagagaagttgctggactcgagcccacgcacattgagctccctcaatacctgatggaagtcctggagcacaggatgtaggactatcggggccaaacgtagatccagggaatgttgttgtcaacgtgttcagcagctgctcagcattttgatataagattcgaagtttatgagaacctgttcccgagtcagttccggatctttcttcgcttggacgccattaggaatagattacataccatgatcccacatctctaaaaattctgggatgaataccccaagactgtttaaaggaattgggataccaagaagccccgccaaggtcggagcaatgtccgcctgctcaaccgtttggtagtactgcatatcacccgacggttccactgggctttctcttcggccacccaaggcttcaaacttgggtgaaatgaaaagtaacgcgggggatgtttctccagcagatgacccgccatggtttccagcctcgttcatgccatgatctccgcacaacacgaaaagtgtggattgaagatgatcttgttgctgcattgcggtatagatttcagtcaccacagagtccatctcgtgctgtttcggtatcatgaatggactaggagagttagaggatagagagcagctaataatgaaatcgggagctgaatttaccttttggggccagccttatgtcctatgtgatcgagacctaggtaatgcattatcagagcagaccagtcatcctgggcaagctcgtgaggaacgtgtcgagtcacattatggtctacttccgtgaagtcctgcgaggagaatctcagtttcaatactaatactgcggatacacaaacacctaaagtacaactgaccgacacgaagaagcttgtagttccatcagctcggtcaaacattcccgggaagagcttgagccaggtatcatccccatacatcacaagccgtcctcctgtagccttcaattgtgccaaccaggtgtcctggtatgccagtgttgacgaggtatccgattctgcgatattgagaataacatctagaaaagatggaactgaaccagttgtgatagcttttaatcgaggcattgtgacagttggagcgcttgcataggcagtgaatggcaatgcagcaccggaccggatcaagctagtatccaatcagtcacttgtttcgaacgaataaatggtgtatttcaaaagcgacacccacctctgtgtaaacaagaaacccgactcgttcgaatatacaaagtcgctatatgtgagcaccttgttagttactgatatagctcggagttgaattattcaaatcatacctcctcagcgcatcaacaaccatgaagataactttatcaaaagccgcaggcactatgacattctggccggtttcatcaaaagtcgctaatccagggatcaacggtttataagggaagaaccctgaagagaaggtgagtatgcccacgggcaccagcaaattggcaatgactgtcgtccaactgcggaagcccgccatttttgcaaattgacttgatgttagctctggcagaacaaattttatgtaaagagaccccgaatcagctgcacctgtcgaactgtccgggggatccaaagggaggcagaattatatttatgatcgtcgcgcatcaccacaccgccttctcgagtaccttgtacaacattaggtatagttattgtaataatactattgacattagttcaaagattcaacaatcattcaggggctagaacttaacagcgccggatgaatgcatgaactagccaactgatcttgactagggttgcttgtcggtgaattaagaattagatctacatcgaccctgctccagccacagtgtgctagggttgcttttcttccactgagcaaaatccaatatgtcaagctttgaatgaaaggtatggtatatcaggcacagactataaaacatatgtacgtgaattgcaggtgtaattgtagactcccaaacgcctttttcttctccgccaccacatctcgtcaaatccattcattgccctcactcggcacaggcctcacttcctcttaggtcccttcttggtcgtagatagacgcttttgaaagacaatcgagttgcggggcttctggttgcgcttttgcacacgtgccggcttcttcttagagctcttgattgcgtcgatatccatctctgtgttgggtaagcgttctgcagttcaaagcaaaaagtgaagattcaaatgctggattgtcatagactaaccttcactgtcaccagtctgagccttggctgcttcggctaatacggaatacgaagttagtcggtatccttagaagagggatggtagtatacataccagcctcgtccaggtccatctttgatttcacaggagcttcaggccgtggctgtgatgcaagctcctgtagtttggcagcgagtctctcggttctggcatcaaccagtgggccaaagaccttcttgcgcagattggctctgttgcgcttggaaacgctggctcgaacacttttcgccattgtatgaggatagaagaaaaggataatgggaaggataaggtaaatatggtatcaacacttgaggatatagaccaagacgtcggatgggaaataaaatagtcaactgataacacaatcaacttttttttcccccccgataggctcgtcttatgtcatccggagaccgcacttcccaaggtacacctccgaggctttgtcgacttgacctcacccttttatggctggggtttgtggcctttctctaacatttcactccagtcaagagatgtatcgatgcagaacccttacaattggcctggctgaatcggacccttgtctttcgaggaaccctgaaccaagtccaccttgattgctttcgcactcctcttatctgtgaagcagtcatgtcgaccagcctgtcgtcagaggtcgcgacactgacagcctttatcaagccccttacaaatccacaactgaaagatttgttgaggtatgagggcctccaggtatccgggttgaaggcaaccctacagtttcgcattatccaacgttcgtcaactctccctaactcttattatgacttgttcatttgatcttcaaatctctgcttcacatcccattcttgcagcgatccgtacattgaccgacgatataggaatccaatctctcgcagaatctgaccctgtcagtttcgatgctctagctcggcgcatccgtgctactgcttttccaaacaccgtgccgtatcaatcacccgctagaccacaataccagccaccgcctgtctctcaatctcctgcacaggctcgatccgcgccgctcggggtttccatgtcacctcactcatactctggtccgagtgctcctctcatgaaacctcctgcggccgctcataaatctccaggtcctttgattttcaaagaaagtccattttatacaatcctagagcctttgactgcagtcgtggaatgtaaaggtatgtcactatctatctgtgaagcttgttgagggtctatgtctaattttacctagtacgcgaacaaacgcgggatagtgttgaactgaaggtcatgctatctcagcaagttgcctataggctgcaaacggactcaaatcttcgagtgatggtttattgcgccggtgattcaggtctcacacaatacaccaagtcggatatcgcatttccacatcaagtggagctcaaagtcaatctcgatgaagtcaaagctaatctcagaggcctgaaaaataggccgggcaccacacaacctgcagatgtgaccaactggatccgtaaaaagccaaattatcctaataatattgtcatgacttacgcattgacgcaaaaggttgagcttgttccctttatactcgatagagcatctgttaggccggttgactaactcctgtttgcacagaaattcttcgcgcttgccaacctcgtgaagcagcatccgactgatgatcttgtctcgcagttgaagacacggaaactcatctcgaaggagcaagtcttgcgcgaaagtaagatcccctcctattcccttgggtcagactatgctaatttcgatcctcagtgcgaaatcgcgcaaatgactcggacattgtcgcgacatcaagtgtcatgtcacttaaatgccctttatctaccctccgcatccaagtaccctgccgctccattgtttgcacacacaaccaatgctttgatgcgtcttcattccttgaattgcaaaaacaagcaccaacttggacctgccctgtgtgttccaaatcaactagctttgagtctctccaagttgaccagtaagtctaaacccccttcctcggcatatctgtttcttttcctaactggtcgtataggtacgttgatgacatccttcagtcaacgtcaccagataccgaccaagtcatcgttgaacccgacggcgtatggtcaagccccactgattccgacgcgacgaaattgggagggatgactcccgcgtcagatgacgatgacgacttgatcgagatcagcgaaccagggatgcccgttgtaaaacaggaaccgggacccacgaccgtcgccctggaacgaacacctgcacagtcacagtcacgagaggcatccaccccgtcctccgcgatgcgcatgtccagcaaaaaacgacctattgctcaggtcatcgaccttactgaaagtggtgatgaagatgacgagtcccctcttccacctcctaaaaggccagctacaagtctgccatcccgggctttttctcgtcaggattaccatgtcccgcccgccagcagccctctgaatggcgggtcgtacccaccatgaatttcgattcttatcctagtcaatctgacgaccaaagccttgatcgtttctctttctgatgcatatttccatggagtttctggcggggtagggggggagtcttcaagatatcacaagtggctacgtatctaggagggattgattgtatcattctagttttgaccggtcaattagcctggaaatatatttgaccatcactcttattcttatttacaaataacacaatatatgtttcttaactattttctcgtatagatcaaaaggccaatatcaggtggattccggcctggggttagcttagactccccaacacccccccggaaatccccattttccagttctcatcaacacgccctcattctgtcagccgggtcccttattcattcgcctcttccttagatcctgtcacctttgactccataatgtcattcgattcaacttccccgtcaaatgccgatccaaatgcccgcgtcttcagctcctcatgcttcgacttcctactcatagaattggtgccaatggccgagcgtatggcaaaggaacttgcgacggagggacaggaagctgaagatgaagaagtgagagagacgatattctttcgtctagagtctctgggctatcgtgttggtcaaggccttgcggagcggtaagcataaacatctccttttgcagcccctttgcttttctcttgcagtcctacagcgcgctaaaccgtgtcgatctctatagctttgcccgagatcgccctcgatttaccgataatctcgatgtgatcaagtttctctgcaaggatctgtggacggtcctattcaagaaacaggtggataatttgaaaacgaaccatcgggtatgtgcaatacagaaactgctgtgttggggagatgcgacataaacagcacttgcacggagatgtttaaactaatatcaataaatagggagtctacgttttgacagacagcgcgttccggccatttggtaggatgagcatggcggtgcggactgaagcaatatccatggcgcaggcagtaagcatcccctttgcaattaatgaggatttctcggcttatgggttgacctagtacctctggtttccttgcggtatcatccggggcgcgttagcgaatttgggtatcaacacgaccgtgcaggccgagacctcggatctaccaggtgcaactttccagatcaaaactctccagcctcggccttgaacatgaaaatggttgcgcctgggcctgggctagcccttttactcaaccaatttacgcctactcttatgacttatgacaattccattttaccaagaccttgtggttcctgcgatctactacaaggatcgttgatcgatcatcatctaagtcgattggctacgtgagacagaataccgaaaacacgcaaaaatgaacagtggaatctgaacccttgaaattgcaggttggttactatatctgtgtgtcaaacctacccatctgatttcgggccgtacactactcgtgtctgctcattgttcataaactcatggtctcacatttaaagcctatctttccgggagaagattgattagcaacgctctgccattttctagtgtcatcgcagccgtggagaaactagcgagaaatatatcgacacaaagaggcccacccgatatacatggtgcacaacggacattggggggagggaggtcttactttggtggggagttcttagcgaactcaatgcccttctcgatgttgccctggagtcccttgatgcaagcctcgaggagcttcttctcctgctcagtcacgccgtcaaggatgttaatggccttctcggcaccgttgggctagatcgagcattgtcagttagttgttttaacacattggaaaattgaagacttacaccgagttccacgggagtggagaagaagtcaagaccggtggccttggcaatctcatcaccgccagcaacaccgggcaggtagacgaaagtaggctcaacaatgcccttctcgcccttggaagccttgatgatagcctcggcgaatctaatatttgtcagtcaccgtggtagctccgggttagcaggtgaaacatacctgaaaccggcaaaggccatagacagagtagcggaaccagcaccatccttggccttgacgacctcgtcacctccgaattggacacctgtgaaatatcagtaaacgcctcccacggaaagggctgttcacatacgggtaacaagagcatcgtatcggtcagcagggatctggaagctgggggaaaccttgctgaacagaggaacaatggtctcgccagagtggccaccaataacgggaacggtggcatcagaggcattcttcacgccggagaactcctgagtgaaggtctcggcgcggacaacgtccagggtggtcacaccgaacagacgcttggggtcgaagacaccggcagccttgaggacctcggcggcgatggggactgtggagttcacagggttggagataacgaggatgaaagccttgggggcaaactcggcgatactctcgacgaggcccttcacaattccggcattgaccttgaaaagatcatcacgggtcataccaggtttgcctagatgttaccatatacgttagcaaaaacaccacatcccgatctgtggataatctactaacggggaatgccggcggggatgacaacgacgtcagcaccggtcagagcaagcttcaatccatcatccttggggaggtagccagtgattttctagtcaaattgttaacgggtttattatgatgcttcaggagtatacatatacgtacggcgaccgaggagatgtgagagagatcggcagccacaccgggggtgttgacaacgtcatagagggccaggtcatccacgagaggggaagccttcagcaagagggagagaggctagagggtcgattagctgaggttcataagaaaccctaggaaggataaatgaggtggggggacatacctggccaatgccaccagcagctccgagaacaactaataacgaatcagcaaatgatagacaaaacggctgaataacataccagccttgaccatgatgaattaaatgcgtgtatttgtagagaaagagaggaggagaggaagaagacaggagagaaatggggaagagagaagcttggagaggggaccggccgatttataagaggggcaagtgctgagaggggcaaccccggaatactggaagtgttgatgttcggagttcctaacatgtgaagtgatgaggtgacgatatgcacctttattcgacttgatttgcctttcgacttgattttgctcgctttgactatcttctactattttggactgtgtgagatctagtcctccaatcccccatgtcctctcatcgctctataaagaatggccaaggtaaaaagctatagacctttctccagactctccggcaattctcgtcccttgacctggacagttccacacttccccggggctaccgggttgttatatcgggaaaaggcggactataattctcatctacaaccggacattgtggctcggcccgaccagtcggttgtgaatcaattttacttcttcccttggctagtttctcttccgttccgattagcagtaggaatcgttctttccggggaggggtggggggagatgatttctctcgctttagaaggtctcagacaggacacagattttttttttgctgccctcggagcaagattgctagattacatggtttccaagttcagcatggcgttttacatacgcctgtcaagtctccttcccagatctcagatccttcatagtccacaattcagccttatctcgagaaaaccttactcggactcctcggccttgcgggccttggagccacggggcttctgggcaggagcatccttcttggggagctgcgagcggcggacggcgctcacacgggcgacggcctcctcgcgaagatcggcacggtagttgttcttagcggttctgtcggcaacacccttgtagatcctgtaaagcagataatgatcagcactggatcgtgaagaacaacacacaccatccatgtcttgaaaaacaaaggaatgaaaaataggagccgcttacttgcggttggcggtgctgggaccgtaggtgacagtgaccaagttctgagcgggctgctgggggttgctgggcttcttggtgatcacggcgacaccgttctcagtgggctggacaccgacggcctgaaggtaatataattagcgccacaaatctatcttatatatataacagggacaacatcagcagtatagaacttaattaccttggtgttggaataaccggcatactatagagcgccaaaagagaccgttgttagccatgcattcccggaaagaaacatccattccgtctaatccccgaggcccgtaccttgtaggagtgcttgttcagcaggttcagggggtcccgggagaactgggagccaccgccggagttgcggttaaccaggaaggagttctggttgcctattccaaagattgatgagctggagttcggtttccaaaagctttgacaaaaattcgaaatgaaaagttgcggagggttggacatacgggtgatctcccagaccaggtcgttggagatgtttgaggacattgtgatgagaggggatgttgagttggagaattgaaagatcgaaatcgctatcaaaaccgtcttcacgtcgatccaattgtgtgtcttgaatgccaagacctcggattggacgaagtctcgctaaggcggctactttaggaataggctgagtgccttggtgcctgatgccttgatacctgaatactgctgcctgtcaaacaaggcagaactaacaacttccggcgacctccaggctgccaataatatgaacgcgatgctgacgttgccccctccaaactctactttctagtgatctcctatgccttcttcatcgacggcttattgcctgatggaacacatcatcttttagtccttctttggcaaagaactctcgagaggcgccaacttctccttacaccgcaatatactactactccgtacacgcccgaatcttcaccggtatcactcatcatcatgacctacattctcttttatttcctactcttttcggttatcatcagcgggacaggtaggtcaagtgtctttccaacccgggaggaaacaaagcaatcattctcaacggatgtggttctaattacactgtagccttatacctcactcggtcacgatggatgccgttaatccaagtgcctgattatctctatcaccgccttccttcaagttttaccgccgatctcgaggccggtctgagctcgtcgcaattcgacattactgccaatcttgcagacggggattcgagggctggcttggatcaacgagcaaagaaagaagtgatcaagattatgaagagtcagaaggtcgattttgatgaagcacggcgcatctacacagagcaacgatttgcaaagaataacatcggaccggacggccggccaagggaccctaaattcgtctcattttcgtgatttgccttcaaccatatcaccagtcctagcgtgttttgtggccattgtcagagcggatctctcgctagcagaatccgtacaaatagaggtcccagcttttgaccggtaatatctcatctgtgctgtcagagcgctaggggtaattattttatcacttgagcgggcggatatcttgtgtctgaaatgatccttggcaacttaaacctatggagttgacgtattatcaaaatcaaatacaacacgtctgtctgtctcgtccgtgtctaagtcacttaatattacatatggccattcagcactgccaatagccagccagcgccaaggcacatttcgatccacctcctcgcacccccataaacatgttcaaggtagtcaagcaggagaagaacatctaacgcatggaccacgctttggtcctaggtcgggaatagctttggggaggagaggcgctctcaagactgaaaaccactaggaatcatcgactgcctgcatatccgggctgttggaagcccggtggcaatgaaggggctcccgctggaggtccaaacccaggtggtccaaacccagggggagctgcagcttgtgggacgaagggcggttgacctgcaccattgaatccaggtggtagaaacgtctgtggaccaccgtagccagcttgggaaggcggaggtcgagctgggagcccgggaggtggggtattgattgaagggacgggaggtggaacatgtcggtttggagggggaacggtctgatagggcattggagggggtgcactctggtagggcatagctggcgggataccccggttcattcctagatcgggtgtttgtgactgagccgtaatcaatgggcgagagctatcgccgttcgacatggcaggtgttgctgatacgcccggcgcagcgccagggaactgcgaaggttgctgaggttgttgagtcggtggctgtacgttgtgtttgcgagcctgggctgcgagcattcgctccgcttcatccccatgtctctcgcctttcccatctttcttgtacgcatactgtaccgaaacctgtttgttcatcaggtactggccattcatgttggagatggccgcgtccgaggattcgaaatcggcaaaagaaacaaatccgtatcccttagagagattgttgtcatcacgagcaatctgtaaagtaatatgaaaaagagactgttaaaaatttccatcttgttcgtattgggggagatctcactttgggcggattgacaagattgccaaaccggctgaacgtatcaaacagaacctgctcggcaaccataggatccaggttacccacaaacagctctgcgccgatttccacggtcttttgtttatcggctgacgctttgttaacgcgaataggcttgctatggagacggattccattcatgatcttcgatgcatattcggcatcttcctcgctgatgaactcaacaaatccatacccctggtgtagctgcgtgacccggtctttgggcaggtggacgttgacgatgcgcccaacctgtagcatcagctcccatacaaggctgtccgaaacccgttcatcaaggtttccgatgtacacggttgcctctttatcttgttccctggggtaagttagcatcaggtccctgtggggaggaaagaaggtcttaccaatgtcttgcgttagacatggcgccggtgtattagttggagggagaggggagaaaaaagctccccctagcggaaaaggactcaaagatccgagaaaaagtaataggttgtgaaactctagcgaaacctggaccaacaaagtagactaatttgagtggtagtagagaggtaatgaggtgtgaaagaaagtgttgaagtgaaggaaacccggagttgagggatgatcagtgacctttccgaaactttttgattccgcaaatcctccctgttttccacttcatccatcaaccacatttcctacttgttcacttgaatcgaccgtgaaccaatttcaatttattcgtgttgatctccttgaaacctttccaaaatctactttcataaattcacaatggttcaattctccgaggagaccaaggttagttacaaccccgatcctccttgagaccgggtttctaactctcgctttttgatctatttaggagcgcatctcgaaggtcattgatatttctcgggtcgcaattcactagtgagccttatagcacacctccacgccatcctccgagctgaccggcgataaccatctagcggatacttgcctctgattgtctatctgggtatgtatatatatatgcctttggtattctcaacacaataagttaacaaaacaacaaaaacaggctacacctatagcgagcccaagccgacattgttcaggtacgcttcaactccttgaattccagctgtcatgactaacttgatacctagattgttctcgcctcttgcgtaaactgcacgttgaggatacgcggatcggatggatatggcgcagtatattgttggatgacctttcaactattccctccgggagggatggtaggttcgaatatctggataatcactgtttgcagcttgtgaaagctatatgatttttgtaattttaagtctctggccgaatattgtccattttggtacagaaatgctgtgtgatctgcgataattccggagtaaacaactgagctttgtataaaaaagaagaaaatctggaggtctggagattaatgtgtggcatatgttactatacgctccagggctaagatctacggagttactcggcagtcacatgttctgacattattattcttagaatattctccatctatcttctccctcctctaacattgttctccacacactctcttcctctcgtctctgtctctgtctctgtgtgttcgattttcctagcttcgtctctaaggcaggttcatgactagtcaagatggcctctcgtcatcctttgtggagcccgtagcaggattcacagcgggaatcgtgtcaactctatcgctacatcctcttgacatggtcaaaacaaggctacaaggcaagcatcgatattatcttggcgctgcttggggtatagaataactaactccgtcttggtatatatagtcgatcgatcatcttccgggtttgggacttcactgcaggtcattcgcaagatattctatcatgagggtggctgtgccgctttctaccgaggacttacccccaatcttatcggaaattccacaagctggggtttgtacttcttatgctacagcagcttgaaggatactattcgaatatatcgcaaggagagcgagcagattctcacgtcgtctgattatcttctcgcgtctggaagtgcaggtatgcacatgtcatatctaattcagcatcgttcctccgttccccaattaatctttggatttccataggcgttattacgtcggtcctcaccaatccaatctgggtgatcaaaactcgcatgttgtcaacgggttcccatgctccaggggcatattcttcgtttgcatctggagcaaaacaaatataccaattggaaggaatacccggcttctaccgaggtctcgtaccagccctctttggcgtcagccatggtgcccttcagtttatggcatacgagcagttgaaacttttcaggttgcggtcgatgaataacatgggctcaattgagagcagtcgcttgggcgccgaacgggtgctgggtaatgttgatttttttgccatctccggtctatcaaaagtcttcgctggcagtgtgacatatccttaccaagtaattaggtcccggttgcaaacttacgaggcccatctgatttaccgtggggcgattgatgtcatttcccagatatgggcccaagaagggatcgcaggcttttataaaggtcttggtccaaatctgttccgggtacttcccagcacgtgggtgaccttcctggtatacgagaatactaaggtctacctatcccagctggcacaaaatccatgaaatacttcctgctaatccctgcccattcttatatcaattgatcctactggagccttggatcaggttagcaacgtcctgtatattcatcaatttataacatcttcggctgccatatgccgatctctaatcttttcacgatcttagctgaaattccgcagttaaagtactatatataaccagataaatgaaggaaggattctaaagtatagtcacgagtatacaattggaataagtaaaagtctcaaaagtctatacatgttatagcaaccagaaaaggcccacttccgtgtatttctttgcttcctatattatattagtagccagtagccacgtaccgtgataatacaaggcctagtaggataactagatcttggagtataacgctccttttaacaattatacttattttaccctttggactaggatcttattattcctaccataaaaagaaagtctcccttttattcaatggatggctactattcctccaaaggacgagaagagcgctccacagtcgccgtcaagttggaagactgcgatgctctcggtacatacgatgcccgcgtgcagtgaatatagatagtgtcttcaggcctcgcttatacaatcaggattagatagcctggaaatggtcaaaagcgtagcatattacggatagaattgatcaagacgaagagaaagcttctgagaccccagagttggacgcattcccgttggaaattgaaaatgataaaatacggtttgaagctgactccgaggctgttcataataccgagaatgataattacgataaaaatgacgatgaagagtgaggatagcgacactgataatccttttgcgtaagatgtttttgacacaaagcgataagaagtagtctagttattgtaaactcaattggtttcattgagtgtcttcggtcatgatagagactggtttaaattggttctggtacatgtatccctcgggtacctggtcatatatgaaacctctcaccctcagatttggactctgtagatacatgagtacccgatgcacttatctatggttgcgaagtctcgaatgaagatggaataaagtatgaaataggtgctgagctagtcaggccgagagcaaactccccggactctatactgttcagtccgcactagtactccaggatacacggtttgaaaatataatactgtgccgtgggatgaaagccatatgccaggcaccaaggcacttctgcaccttagataaatccagacccaagaccaaggagctcagctgcttcacgagaatagctgttgacattctaacctgggctctgactgagtcacaagctgccttgccctatttgatatgcttaagcatcgcctcggtacaaacacggaatcatagttattaaaggttggataagttgtactcactttacgattgacggggtttctggatagacaggcgttagtgcgttcaaaagctatgaaacttaccttcgcagatagagaattgccagcccttcttctcattatagcgagtataggggatacatctgagagagagagagagagagagagagagatcggttgcgtatcgttggtgtcttgaggtagcgccaaaacttccgcaggtcacatagatgactgtggatgtgtttggtttatcttagtggccaaggcttcctgctcaggtggcttctggaagatatcaaaaatatggaagctgcgtatatactaggctccataactcaattggttagagtgccatgctgatgacgagggaccaaaaatttatccgtaccctactattctactttgataattgcatagatacagagttagagccatcaagttggctttgcgtctggagtgagttatcctcgaatggtataaacttcgaatgctgactagatttgtagggcattttatccctccagcaagcttgtgccgcccaggttgctacttctaccactcttggcttggcaattgggactgtgtcgggtgccacagctctatcgtatgacccccatatcttgaaatgataatgtagtatgctgactggaactgcagcgctatggcaaatgtgcccatcagtggtgctctgctcgagaagtacgggtacctttccctgtcaatattttcaggggtatccttgctactaggtggcttgcttttgattgctgcacgtctagtacagaacagagagcttcgagctatcgtgtaatgcttggccattgggttgaatttgaaaaagtgagaggtgaagctgatagaagatgggaagatcgatcaaagtccaaagacgattgatggatactgatagaagaggatttgacggaaaatcgtgcagcatattttccactagactataacaaaaaccaatgttcctgtttaaggcttaaatgagccataactatcacattctgataagatttatcgaaaaacaaaaaacaaaaaagaatggtcccagagggggtcgaaccctcgacatctgcgttattagcacagcgctctaaccaactgagctatggaaccgaatatggaatacactcagcattttttacatctttgaggcggcgggtgcaaggacaccaaaatacaatcttgttctacattcgaaacgtcaacttcttcggacgcgaatgccagctacaacgaccactaccagtctttctttctgcatcatctgtggattagatgaatttttcgcgggggccatatcacaatttacattattatttatcatatgactctatatatagatcgttgaccacatttacattgcttgctttcttgcttgcttcatgcttgctatctggctctttctttttttggttcttttctttgtgaatagattttttgttagcttagcgaaaggtctgatgtgcaaagtttatagagtggtcagctataaccaggctgctcccacttctcttcttcctctctctatcgctgtttcttaattaaatggacataggcataccaactaatgtaattagtatgaagtgggcggctggcctaatggtaaggcgtttgatttcggctgaacttgattcaaaaggttcgacatctcaaaaaattgcaggttcgatccctgcgtcgctcatccttttttattttgttcaattcaataccttcttcaccctgcctgaaatttcagcaccgccttcattgcagaacgaagtgaagcaattaaataataacctcgtatatatgtcacatgattggttatttttattctataattgtgccaagtgcctaatatacaatatatatagttattaatacatcctacttaataatcactcaataataattttagtctttattacctactttattaatatcctatacctgtaaagggacgaagctagattagaattcaagctaactaagccgtttactattatctaaaagcttaaggaaaggaaataaagcttataggaagaatgtcaggaccctagtactaagaaggctgatgcctgagattttgcacctatcagggtatatagggaactatagactaggcaggagccatatatactacctatatagcccccttcttattatatgacctactacctatatattatccttatatactacttcttaggagaagtagctattagtttctaatatactactatatatactactatctctatttcctaatcctctattatatatagtattccctnnnnnnnnnnnnnnnnnnnnnnnnnnnnnnnnnnnnnnnnnnnnnnnnnnnnnnnnnnnnnnnnnnnnnnnnnnnnnnnnnnnnnnnnnnnnnnnnnnnnnnnnnnnnnnnnnnnnnnnnnnnnnnnnnnnnnnnnnnnnnnnnnnnnnnnnnnnnnnnnnnnnnnnnnnnnnnnnnnnnnnnnnnnnnnnnnnnnnnnnnnnnnnnnnnnnnnnnnnnnnnnnnnnnnnnnnnnnnnnnnnnnnnnnnnnnnnnnnnnnnnnnnnnnnnnnnnnnnnnnnnnnnnnnnnnnnnnnnnnnnnnnnnnnnnnnnnnnnnnnnnnnnnnnnnnnnnnnnnnnnnnnnnnnnnnnnnnnnnnnnnnnnnnnnnnnnnnnnnnnnnnnnnnnnnnnnnnnnnnnnnnnnnnnnnnnnnnnnnnnnnnnnnnnnnnnnnnnnnnnnnnnnnnnnnnnnnnnnnnnnnnnnnnnnnnnnnnnnnnnnnnnnnnnnnnnnnnnnnnnnnnnnnnnnnnnnnnnnnnnnnnnnnnnnnnnnnnnnnnnnnnnnnnnnnnnnnnnnnnnnnnnnnnnnnnnnnnnnnnnnnnnnnnnnnnnnnnnnnnnnnnnnnnnnnnnnnnnnnnnnnnnnnnnnnnnnnnnnnnnnnnnnnnnnnnnnnnnnnnnnnnnnnnnnnnnnnnnnnnnnnnnnnnnnnnnnnnnnnnnnnnnnnnnnnnnnnnnnnnnnnnnnnnnnnnnnnnnnnnnnnnnnnnnnnnnnnnnnnnnnnnnnnnnnnnnnnnnnnnnnnnnnnnnnnnnnnnnnnnnnnnnnnnnnnnnnnnnnnnnnnnnnnnnnnnnnnnnnnnnnnnnnnnnnnnnnnnnnnnnnnnnnnnnnnnnnnnnnnnnnnnnnnnnnnnnnnnnnnnnnnnnnnnnnnnnnnnnnnnnnnnnnnnnnnnnnnnnnnnnnnnnnnnnnnnnnnnnnnnnnnnnnnnnnnnnnnnnnnnnnnnnnnnnnnnnnnnnnnnnnnnnnnnnnnnnnnnnnnnnnnnnnnnnnnnnnnnnnnnnnnnnnnnnnnnnnnnnnnnnnnnnnnnnnnnnnnnnnnnnnnnnnnnnnnnnnnnnnnnnnnnnnnnnnnnnnnnnnnnnnnnnnnnnnnnnnnnnnnnnnnnnnnnnnnnnnnnnnnnnnnnnnnnnnnnnnnnnnnnnnnnnnnnnnnnnnnnnnnnnnnnnnnnnnnnnnnnnnnnnnnnnnnnnnnnnnnnnnnnnnnnnnnnnnnnnnnnnnnnnnnnnnnnnnnnnnnnnnnnnnnnnnnnnnnnnnnnnnnnnnnnnnnnnnnnnnnnnnnnnnnnnnnnnnnnnnnnnnnnnnnnnnnnnnnnnnnnnnnnnnnnnnnnnnnnnnnnnnnnnnnnnnnnnnnnnnnnnnnnnnnnnnnnnnnnnnnnnnnnnnnnnnnnnnnnnnnnnnnactattaatatattatattccctctataaagccctttatatcttacctagttaataggctgtatacctatataatatatacctttatacttattaggttatttcttctaatcctatatttaatagcctaaaacctagtctaatataggtattaaataatatagttaatagtattaatatatttaggactaaggtttagtaagaatttagctacttttctaattacttttataatatttaatcttaagatagtagttatatattatataaatctaactttagcttaatatctaacgtattttactactaagtaggctactactagtgagtgggccacctatctaaaatatgtcgattaatttaaacccttcttctttaactactaactatactactaattcgctcttaatactttagaaatttaatagagtaagagggtaggatcttactagctatctaggcttttaagaatcaagaaatttctttaatttataagatagtatactattttaaaatcccttatactaccttataatagtactttaccggtaataccttttattctaaaatatatactaataactataagttaactaaaagtaaggaagaattactttaaaaatagatactctctatagattcttataaagtagtctcttagccctcttttatataagaaatagtaaatcttcttttctattaatatagaactactctaatctctttagttaataaaaattaggttataaaatttataaaatagtaccttttcctttcctcttaattcttaaagtattataattataagtatataaaatataaagacctaaggattattagagaatagtttaatttagtttaaaaaactattctttagtatagaattaaattagataatatttataactttaataagataggttttactataggattaattataatagtaaaggttataattagatataaatactataattagtaattacttttataacctagaaattataaataagtaactataattaaatatataaataccttaggttaggtactatctttatatattatttttagaaataaaatatttattaaatcttagtttaatagccttttaaagaattagtattttaaagttaatttaaataattagatttctaataagattaggctttattagctttaaaagctctttattcctttaactttattatatataaagggaaggtattaacttttagtatttaatagctatagaagttatttaatcctaaagtttaataaaatttataagtaaaataatattatactaatttatatattactatattcctcttaccttttataactacttaatattagctattttataatattaaaataggtatatagttagttaattaaattaaaaatataggttaagattaattatattaataaacttaaattctttaaaatatacctatttatataaactaaagcttttaaattagagataattaagaataacttcttagtagttaatttaataccctttttatttaattaaatacttttaaagctaagtatttagctttaaatacctaccctccctttaagctaaagtaataaattaagttagaattttatccctaaaactctatttatagagaaagaactatattaataagctttattaattaaagctttattttatataaagtcttatagcctactaagtctattaaattatatattagattagtttataaaaggcttctatcttataatataaggtactatcttacttactaaagaaaataagaaactatatattattaataagaaataaaagtaaaagtatattagatcctagaggtagatacctactaaagaaggcctcttagtttaagaagtctctatattaattatatagtaataggaagtaactaaagggcctctctctagctctagtataccttagggatcggccattcagctatatatacagcccccttagggatatagaatatataggttactagggtatagaagagaaatatatctagatagatagattatttagttaaattaatttaatggcattttagttaagatatttatatttaaaattagtaggttaggataggtggcctacttactagtagtagcctacttagtagtaaaatatattatagatttagcttaatatagtaattctattaaatagttttaatagcttaatatttattagagaattaactttttaactaataattagattatattttaatactatacttttaatataactatcttagtataattaaagcttcttttagtctctatcttataaaatatagatattaagaaactaactaatatctaacttatataattcctagtatttttttatctattaatctaaatatattatttaattaatatattttaggtgattaataataatattattaatataaaagaaaataataatatt

SEQ ID NO: 13 - DNA, 660072 bp, Penicillium roqueforti
  misc_feature (753)..(1077): n is a, c, g, or t
  misc_feature (4516)..(4816): n is a, c, g, or t
  misc_feature (116305)..(116453): n is a, c, g, or t
  misc_feature (229339)..(229495): n is a, c, g, or t
  misc_feature (257510)..(257753): n is a, c, g, or t
  misc_feature (315697)..(315828): n is a, c, g, or t
  misc_feature (443496)..(443598): n is a, c, g, or t
  misc_feature (445471)..(445984): n is a, c, g, or t
  misc_feature (511964)..(512188): n is a, c, g, or t
  misc_feature (527185)..(527870): n is a, c, g, or t
  misc_feature (564654)..(564980): n is a, c, g, or t
  misc_feature (590137)..(590487): n is a, c, g, or t
  misc_feature (649658)..(649847): n is a, c, g, or t
ttaataagttctttagtagtaataagtctctcttagaatactacttcggctttaaggacctggattctttcttagataagttaggtagtttccacggttactttaggaggattaattagattttcctaggtctaggattctattcgttcggttctagtagttagagaagtagttcctattttattccttagtcggggctgattcttagggagttcggtatttccctaggattaccgataggttaagggagccattgtatcttaggcagttaaagaagaagaattagaattataaaggtatacattatataggtatacggcctattaaccgggtaagatataaagggctttttagagggaacacaatgtattaatgatataccaagactaattcttactaatctcggaggggcccctagggggtcctaaactataaggaaatctatctgcctatgttcatataacgaaccccttacggatcgatatcgaaacagatgtatgataatatagatattccttcccgagcctgtgcaggtttacatgtatttccctcttgtacggacctttatctgttataacaatccgctgtacttcttaagaaagaagtaagcgatttataggctaccaacgagaagcagaagcaaaagtgtactagattccggaggcagatacctgctgaagaaggcctctccgtttaggaagcttctcaattaattgctgcgccggtggaagtagctgaagcaccccccccccnnnnnnnnnnnnnnnnnnnnnnnnnnnnnnnnnnnnnnnnnnnnnnnnnnnnnnnnnnnnnnnnnnnnnnnnnnnnnnnnnnnnnnnnnnnnnnnnnnnnnnnnnnnnnnnnnnnnnnnnnnnnnnnnnnnnnnnnnnnnnnnnnnnnnnnnnnnnnnnnnnnnnnnnnnnnnnnnnnnnnnnnnnnnnnnnnnnnnnnnnnnnnnnnnnnnnnnnnnnnnnnnnnnnnnnnnnnnnnnnnnnnnnnnnnnnnnnnnnnnnnnnnnnnnnnnnnnnnnnnnnnnnnnnnnnnnnnnnnnnnnnnnnnnnnnnnnnnnnnnnnnnncactgggagtagtagggtgctagagaggagaacaccatggggtgactactgagaagagaggtggaaaggtgtctgcgttgctatccaggcctcgggagtgctttgatgtcacatagccgcttaatcatcctgctctggaaacccccactgcattacttagttaactaaaggggggtcgcactggccaaggggggcgcgatggtacaattcaataataatatcgggctgatcaaaattaactagttaagggttgtggcataagcaggtaaacttgaaagtagattcagaatatatgggacatgacagggatatgaagtattataattgcttcgcttcgctctgcaatgatggcaacgtagtgctttcagataaatttagaagaccccaagacggacgttcgctctggcaactcgaaggggccatgctgaactacctttttatggccgattgcaactatagaacctttctctgggcccatctcataaaaaggacctctctccgagcgcatctcgtataattggtggctgtggtgcaattcatttagtcggttccatttattatcggcagcttccacaagcgtcgactgatgcgctgaaggccattggtcaaatcgcccgtgggctgcactattctgatcccgattgagtgatttctccttctgtcgacggtggcgaatgcagagcccacaacaaatggcaatcatcaacaccccgcctacagtacaaccaacgatgatgccaatcttgacagctgtggagagaccattgctgctagtagttgagctgcttgtttcggtatccgtcttggtcggtttcaagttcgaatttgtaggaatcaaattccaggtgttcttccaggtgtttttccaactattggaagaccccgaaatggtggattcattgtcccctattgtcactgtattgacaataaaagagccatcaggtcctggtgcttgggccaaaaaccacttcccaccaagccaattaacgccgacaaaggctgcttggagaaaagcgcggcctagagcaggggtgctgttggtggccatgcatgggaagtattgcgtcggcgtcttcacaagcgggggctctagtgtgagatttaggagagcgaaggggaccctgatcgtgatttcttcgttattgcggctattcatactaaacgtgaatgccaaataacttggagaggtcacaattttgtcgtactgcgcgtcggacgtgttccaaaaatagaggccataatcaggttggtatatgacgggcaactcagcggctatcgcatcacatgagcttcgaggcagatatatgtatggattgactgggtccacaacaatcttgagaccggcatccagggaggaattgccctttgccaagagacctgttttgttggagtaattccaaggcgatccgccttctgccactccaatactcatatcgtacatttcgatcgggaagcttccacttgaaaacgactgagcggacacggttccaatgaccctattctgatcatagcctcccagatgaagtgagccagggattcccagagatgcggagccaatatgcattccataggaatatgatggtattttcgtggacccctcctgctcgtagaggtagctggtgatgaaggtcgcgttgattttgatcgaagccccaaatgtctgattaatatctggactcccaagagaaagggttccaacctgtaaagggtatgcttgtccaccagggtaagtctgccatccagcagatatggtaatcaagtcgacatcaggaacgtgagcaccgtcaatggttatccaatctgttcctcgtcgtgctttggcataaactggaactgcgtccgtacatccccagtccacataaccccatgttccatatggaggtagtgaaattgagttatcgtccaaggtgactgatacgtcgctgtcaaaaagacccgctttatccccatagcataccgacgagagggacttgttgtcacatatggaaggtagtaggattttactttcccaactacctcccgggtacaacgccactaccgatgaaggcacaacaagttcagagtagttgcttccgatagacaccgtgaccgcttgccaagggccatcaggtccgaactttttatcagaccaggtcatctcccggggaccagaacagaggaccttatcgaggcaaaggatccaaattgtgaaaacacattgttgtagtcctctcattcctaagggggaaatattgttagcgattattttctcccaagtatatagtaacggtgttttacaagacaggactgacttgaatcacagctgaagtgacgatgtaatttatcggtttgaacaatgcagtaagcaatgaaggccacaaagttaagcttcaagtatcagacgaagataggtcttcattcactcgtcactgccactcatagaatatcatcagacaattagggtagagttccgagttggagatttagagattttttcaaaagtcaacttgggtgaatatccggacaccgtacagtagatataatccagtaccatcccaagcgccagatataatatagatgtttctaataataagaagaattgccaaatgcgattgatagttagcgccaagatgtgatgaagtcgggcacggaccaagacaccccaccgtcgaggcgttcgcttttgccaatcagtcgttattagagattctagcgtgtctcagatcatgcatcgacagcgcttagccgcccatttatgactgctgcaatcacctgaggttgtccctggggaaatggacagctgagggggtcgttttctgtcgcatgcactttccgaccttctcataccctccctcttacatgcattttgatatggactgagaactgcaaacacatcgaggttttccttcgacatttacgtgaaattgaggaatatacctgtcaatttttccaggcgataagcgaccatgttaagtatggccacaacatctccgagagtctttcgctccatgttcatagctttgtccgctctattcggctttgtgacattattgcgactttcatacaatgcgcctctggatgattctaattcgcacttcgacggtctgtccgggaagcaagtggacgtggactggtctcgatttgcatacacccaatatgctaccgacagatcttatctgtgcaactcactcatgattttcgaggctcttcaccgccttggaagcaaagccgatcgcgtgttgatgtacccatacgatttcctcttgtctgagaacgatagtttgccggaagctcgtttacttcgcttcgcaagggacgaatatgcagtcaaactcaagccaatcaaaataatgatgaagggtgggggaggtggtaaggcatcccaacttattacaaaatgtcagaatctaggatgaatactgtcatttttcatccctgatacagttggatcacgtgactnnnnnnnnnnnnnnnnnnnnnnnnnnnnnnnnnnnnnnnnnnnnnnnnnnnnnnnnnnnnnnnnnnnnnnnnnnnnnnnnnnnnnnnnnnnnnnnnnnnnnnnnnnnnnnnnnnnnnnnnnnnnnnnnnnnnnnnnnnnnnnnnnnnnnnnnnnnnnnnnnnnnnnnnnnnnnnnnnnnnnnnnnnnnnnnnnnnnnnnnnnnnnnnnnnnnnnnnnnnnnnnnnnnnnnnnnnnnnnnnnnnnnnnnnnnnnnnnnnnnnnnnnnnnnnnnnnnnnnnnnnnnnnnnnnnnnnnnnnnnnttgttttgtttgttttgattactaagttgtccatcagattgtcatgttttaggactattgtcagttttagagagttagagaatttattaagatttttctgccacaaaatacactcgccttaccaccgtttttccgtcacaaaacttcaagctaaaagtgagcacagcaccgtggtcatcgagctacacgaaactcctcgcttttaatcaaacggaatatgatcgggttcttaacttggattccgatgcaacccttctgcaggtgcgtaggtcaatcgtggccttttctcatttcaaactaacgtgcgtgaaggctatggacgagctgttcctgcttccacctggctcggtcgctatgccacgggcctactggttaaatccaaaggatcgagtctttacgtctggactaatgctcatccaaccgtctacggttgagttcgatcgcgtaatggatgaagtttccaaggctacttctgacgtatacgacatggagattatgaacaagttatatggagatagtgcgcttgtcgtaccacaccgcccttatactcttttgactggagagttccgctccaataatcatgaagcctatctgggtaatacagacgaactgtgggatgctgagaaaatcctcaaagatgctaaatatctacatttctctgactggccagttcctaaggtatgtcataccaacttttggtaaccttcaatctctattttggatatgctgacctcttccggtagccatgggttgcagctactcgtgatgtgatcaacaaaacgcagcctccttgtgagataaatcccgcaactagtcaacaagatgactgccgtctccgggaaatctggttagggatatacaaggacttcatggccaggcgacttgtatgtcaatcctctcctaccttcaattcaatttctgatcaagcttactgaacctgaacagtgtatatgtggcactgctcttcgaacagaatcttcatgacacgtccggttctctttcaacggcattttacgattatcacaaattttcctgtccggccatgcggtacctctgtatggcttggtgttttcaatactctcgttccaacataaccatagaagaagccccctctgcatgagcgagactcgataccatgagaacatcagcaccttaactctgcatatgtggttttgctggtcagaacaaacgtctggtcatttcgactccgatcctgacaatgctacagacgggcacttggcaggctttttacatttcaatgcgcagcgcacttgttcaaagcagttcacaggcaacctgaacggaagcggagaatttcagggccgcacttggcctcgatttggataacatgtatgtaacaataagcaattgactgcaaatacctggcaatctggttttgttgtgttgatgtatctttggggcctcgatgtaagcatttatggaccagctcagtaggtacagtctcacacgtaagttatgcaagcagtaagagaagaaggagtgattctctataactaaatattaaactaaatagcgattaacaagcctgacaaactagtcatcaaggcagttgatctgtcccagcaagaattatacacatcgacaaattcacaagacaatattccctctaagaggtgtagctgcagccattggggttcgaggtctccacgatactagcggcaattcccacacagtcggagtttccagcagggttggcaatgccagcagaagcccaaatgctccaggcaccgtcaatgctgttggggcaggcaatcagatcttctcctgcgaattggaggtaaccatcctcgagggtccaaccctcgcgcacggagtttgtggggctggactgagcaccagtggtgtatccaatcttgccctggcctacatgaaagtcagttatttgccaactaagtaggattgtgagagtgatagcatacccatgccggagcgatcaacgaagatctcctggggagtggcggactcatcatacaggtacagagcaccgtcgaggatgtagaaggttgcctcctgctccttgggacgagcacaactggcaccctggttaggcagaccagcgaagatgctgctcttagcagcgttgaaggcagagttttgcacatcactgccagagtgaatagccacgacaccaaaagtcgcagactggttggacggggcggccgagacaacggcgctgacggaggcagcgatggcgaggttcttgagctgcatattggcggaggggatgcgaagattgagttgagaagatataagaatggttgaattgggaggattgatagttgatgtttctaggatatgctgaaatgcctccccttttatacttggagcgactccgtaccgtcgccaaggttgatgtctcacccattgagactatcctccaggccaagcatgatcctacagactataacgttgatattccacaatgtgacatcaacgtgacttttttatggggcaatcttgtcgatctctctcgtggttttgacagtcaagacaatgtcttatccctgagtattgtgttgacaggatacttcgtataagccatggatatcccagacccagcgtcattagagataagaagcatttcataaatcattgcgtatttgacgcatacctctttttggcctccaatatagctctgaatatgattctgaatatgaacaaactgtcaacccctaaatgacttacttagtattgcttcctccacaattcttccatgtttctccgaattatatccacatgggcatgatgtacgggcgatccgtcatgatctccgaatcaaggccaatcaaggtctaatgtcctttctggaccggtgaaacatgctctacaataataagctggactacggagtatggagtcttattcaaaccgcctggtttttgggcatttcattaatatgggtctctcaacgagtatctataaatagcggagtggctcaccgtccttatgtaggtcctcattcgctggcttccactttaggggcgatcttagactattcgtcaatcttgaagagaatctcatggcttagcatgagtattaaatgagaagagcactgtaataaatatacatatttcgcttgttgcttcacgattcctcgctgaatcatgaagatgcaccggctagaaaagcattttcatatctcgaaccaaaaccaaaaatgaggggatttttgtacaagcaccttgatcaggctcataattccatgttgagatatgctaataacgggaaaacaattgtccttactcgggagcaccgcacgaaaagacgccacgaacttctcctttggcgtacttgattatctagatgagtgagttagtaataaaatccgtgccccaaggcagaccgccagagaaaaacttacgatatcatcaatgctggaatatgttcctccagcaagtaccaccataccgatcaggaaaatcagcgcattgatgactgccagtatcaagttcttgggctctttccaactccctttccgaaggagcatgaaccacatcatggcagggaagtagaaggtgaatccggagataaaaagagcagaagaaattgaaagcaagtcgttgaaaaaaggtatcacctcggcaatgatgaatgccacaactgtggcggccgtgatcaccgccagccatgtcagccagcccatcttagtgttgatgaagcgaatgggggagttggcgaagatgcgaccatgcaccacacgcccaaataccacggtgttgatcgaaccgctaatgaagatcacagggagagcaatgccatacgcaatgcggctgagggtagttccggcagaggtaagtgcagggctggacacatcctggccaacaaaggcgtagattgtagcaccagtgatggtgtagatgacgatctcagtgatacccagcgtccagatcgacttaataaagtctcgaggagtgtgcatttcgtccataaaggagaattggcacatggcaaaactgtaggcgaaaattatgttcgtcacagcgatgaaggcttcagtaaaggagatgttatccttcggccacgcagaccatgctactccggagagtccaccgggcgagttcgtcgcctgcacacccgtcccgataattgtgattccaatggcagcgatgatggatacgaaatcaacatagcctagaattgccacctcggtgaaactaggcggaatggcgagtaggagcaggatgacggcagaaaccacggcaaagatgatcgagcaaatgccgcttttggtgatgtcgaggaatgcgatggttcccgtcagacagtgcgaggccgtgagaaagataagttgaagaccgagcatcgcattgactagctcatatgcaaagcgaccacaccctagccgatggcccagcaatcgacccgcatcagcatagttggcaacctcggggaaggccaatttgaccattccgacaatgtaactggtatagatggcgatgagaccgatgcccacacagcagatcacaccggcgaccatgccgagtgttgcaaaggtggagggaaccgacaaactaccgagtgcaatcgcctcgacgatgaggacgacagtgagtcgcttccaaccgagacgattgaacttgttgataccgtggtcatacaggttcctctcagcctcgctcatttccccgaccatgtccccctcaaacggcggtgggggagcatatgcggccttctcgccttccgtttccatcaccttgtcggtgtcatggtcgttagagatgttttcgaagcccatgatgctggtggaggtgagactagtctgccaggcagaacggaagagaggaaaccgggtatataagaagacaaattccgcgcactgtcgaatgcggcactaccaggaggcaaagcaggattgccttgacaaacgagattttgtgaactctgcttggctgctccagcacgtggagtacgacgctgatccactccagctgatcggccacccaacgagcacaccggaaacagggattggatccattacgaatggagtgaaagtggattgcattgaaattttaggcgaaacgcagcccggcagccccagtttagtgtccgttgtgcgatcagaaggttcggaaggttaggtaaaagaaatgcaacattggtgtaatcgttgggagggccacttgagagccacttgagagttaccgagggctctaacacactatggagtctctccccgcgttactccgtactgattgcggggagagaaatcagagacaaattcacagaagaaacccatcgaaaataagaatataaagatgtcgatggtctttctttaatcgcgccacagaagatcccgaaagccgacttgccaatgaaagactcggaagttgagtggccccggggtcgcctcccccaggcggggccgataagagttttgaaggtcacatgacggctgcaaacagagcaaataatttgatatcacatctacctcctgcgtacggagcacttgtcctacattatcctacttacatcctccttgcagacgatacgatgtacaaggctcagacgactaagagccaccaacgccatgcggtttagcggtcgtggagaatatcgcaaatattgacttgaacgggtctcccccagagacggctgtcatagacatcattgcgagaagtctcccagtctccaactcatccgtgggatccgactccattctaccctaacttttgtctacctcatgaccattgcttatctccattctaacatttccagacctgctggagtacacggaagctgcgagtcatgtttcccatgatgcatcttgaaacccaaaataccacacaacctcgtacgcaattattggggaatccagacatgcattgaacatccctgtcctcccgaccgcggcgatctttgcttacaacatagttgccttattcccagcagccgtgaccgccgggcactccgggtcttggcccccgaccgtggtatttgagcaatgtgctgtccaagtggaagtcgtcagacttccctatgcaggaaagaatgaagcgaacaggaagcaagccagcaggcaagcaatggtcaaacgatgtaaattcacatcatgcagatcgtgtttagaaggggtgttggtctatattgaaccttggcggatagtcgaaatacatcacttccttatgttccagttctgctatagtgaaatagaatgtccagcttacactatctcaatatgttttatcctaccgcaggatatgcgaggtatctagtagcgtaaacatggaggtctaaaagacttctcgcagtttcttcaactctccaaacggagaatgccggtaatctaggtctagggacgcactcctgggatttcgagttctatatttctcttttcttcttcgccttggaaatattgaggcagaaatgaattgaatttctcacacatacaaccgaaaattccaagatcaggacaactcaattaattgatagccactttcatttatagaatttcttcatcggcatagggctgaagtggcaaccatatccgtcagtgggttgaccgatttgtatgaagaacagattgacactaatcaagaaggatgccatgacagacttttataaccctccgagtcaatcttcataaatcccgttctgctcaaaactagactagtttcaggccagtcttcgtaagcagtgtctccaatggaacggttctaaaatggtttcctagcgcatccgtgaactgccggaagtcatcaccagtaggcaatgagtgtaaaaattccacgacgctgatgtgatggttcatttgagcccattcagcagcagtccaaccagaaggatccttggtaaagggtaaagcaccagtgaggttgaatgtacaccagagaaagcagaagcaaggccttcaatatggtcgaaagaagcaagtttccgaagaaggatctggtcagcattgcttggtccattctggaaggcgtctgaggttgccaaaggaaatgcgggttgtttgaggggtcgcgaggtttaaataatcaaaaagataccccatccatcggaacctcgtgggtgtaaccagaaagcataaaactgagcttcttatttagtatgatggatagggaatgtaaaagtggaatattgtaatcctcagagcataatcagatgatgaagctttcaggccgaagaaaatgtaccatcggagtgttactataagagtccagaatctcgaaaagatgaatacctcaccgttcaagtttgacctagcttgacattgcagattataccactgggatgggtgtgagaaagcattgatggcaaagtaaagacgccgcacttcgatacccaaccaagcgccggtcgggaaatacaaacatccggccacgtgatccaactggaggttgtacaagggcaaaactagatagatgattttacgattggactattaagtggataacctatggctatactgtccaaggcaagcagttctttatatatatcctgattctttggaatgccgacaggaatcatacttgacgtgatatcgggttccaggccgagttgcttaccggaggaaccagtatatatatctcggaagtaggccgagtcacttacagattcaatcgcaatcagaccaacaaattagtaatattgaaaactagtcgatcgggtggaggagccgagagtggactcatttagcttgttgaactgtgtacaagattggcttcgtcggttctgacatccgacattggcagttcgcacgtcaaaatagcggcaaatagcttaaatctcaatcggagatatggccgattgcccctcactttgagccgagagaggaatatctaatcggatatggatatcttataagagctataccaggactactggaagtactggattagtacatacttcgatatatatattggacaactttgagaacttcgacatcctctacaacctctacaacctctacaacctctacgatgggttctcacgctaccgtttctcctcaaccccatgtccctttatccggagtctggtgtcctgcggtcactctttttcaccgtgacaccgactcattagacctcgactctcaatccaagttttttgcctatctatccaaaaccgggctagcgggtctagtgatcctagggaccaactcagaagccttcctcctcacccgtgaagagcgagctcagctcatctcaactgcaagagccgccgttggccctgattttcccctgatggccggtgtcggtgcgcactcgactaagcagaccctcgagctcgcaaaggacgccgccgctgctggcgccaactaccttctcattcttcctcccgcatactttggaaaagctacaaacatgaacgtggtgaagcgcttcttttccgaagtagcagccaagtcacctctgccagtggtggtatacaatttcccgggggtgtgcaacggggtggatatggactctgagaccattgctgcgatcgcacgggacccgacgtctgcgcatgctagtggacggtccaatgtggttggggtcaaactgacctgtggatccgtgggaaagatcacccggctagctgcagcgtttgcgcccgaggactttgtgacctttggtggacagtcggatttcctgatcggcgggctagctgcaggaagtgcgggatgtattgctgccttcgcgaacgtttttcccaaagtgacggctcggatctatacgttgtatcagaaaggtcagattgaggaggcggtggagctccaaaagaaggcggcgatcgcagaaggtgccatcaagggtggtattgcgtcaacgaagtatgcggtagcgtgctactccgcccagttggcagggattcaggatgcagtagctaacctggcccctcgacacccttacgaggaggcgggagaggacgtcaaaaccgggatccgacaggtgatggctgaagttgctgagatcgagaagagcctgtaaggagttagacgtgtaccaatgaagatggatttagaccatgatttatttgctgtccaggtaattaatgttgagagatgtgagatgtgagatgttgagatagggggtggatattgagggtagttgcccgacagttcaggccattcatatggttatgtatctcccttttcgagtactagtggccaataatagctgtgctcgtatcggtctgcatctaaaccagacacctcatgaactaataaccccggtcctctggcccctgtactttcaaagatctagagaatcaagtccaaatcatagagtctacggagttgtgctaaatacggacgcttggcagaatggtatatttgcataaaaccgacgtgatagccctacatgcataagtatgaaggcaaataccaaatgaacctcggcttaaacgaccaaaaactcttccaatcacccaaacatcggctcagccgagcagtcgattactgatcgggccgggactaagtggagattgtcgggatattgaagatattgaagccaatcaacgggattgttctatcttttcttctttgtttaataaagatgcagcttattattccatatgaccacccccccactacagctgaaatgagcaatccctccgatatgaatggagtactacatggattacatatagtagacgggtctcgaaaaagcccgtttaccatattgtcaccattctacctcatatcacgtcctacgcagatcgcagatctcgctctagaggtaatctcttgagtctcaacaatggagctctccgagaatgctaactccctacacttgccaacctccatcccattctggcgacttgttctcagccccggtgctatcacgcaagaggttgccgaccacccttgtgccggctcagggaccgaagacgatccctatgtcgtggaatggatgcccaaggactttcgaaaccctcttcagttaaagacttccatgaaatggtttatcaccgtggtcgccgccatcgagaccttggtcgttgctctggtctcgtccgcttatactggtggtattattcaaatcgaagagcgattcggcgcaaccaccgaggttgctaccttgggagtatccctctacgtactgggctttgccttgggtcctctgatctgggccccgatgagtgaaatcttcggtcgccagcttgtcttcatcacaacctactgcggtttgaccgtcttttgtgccgcgtgtacgggcgcgcagaatatccagaccctgctggtcttccgattcttctccggtgctttcggctcctctccccttaccaactcgggcggtgttatcgccgacatgttcatggctcgcgaccgaggactggccttatcggcctttgccttagcaccattcctaggacccgttattgggcccatcgccggtggcttcctcggtatgtctaatggaggctggaggtgggtgatgggtctcttggccatcctctgtggcgtcatgtggttcttaggagccgcgttgaagcctgagacatatgcccccgttcttctccgccagcgtgcaatgactctctccaagcttaccggtcaggtgtactacagcaaattagatatcgatcaaggacgtctcacgctgaaagccgctttgaaaatttctctttcccgacccatgattcttctttttcaagaacctattgtcttgctgctgtcgatctaccttgctatcatctacggaaccctctatatgcttttcggcgccttcccgattgtgtatcagcttcatcgtgggtggaatcaaggcgtcggcgccttatcttttatcggtgtcatgattggtatgctcgctgccgttgcgtattcaattcctgaaaataagcgctacgcgaaacttctggagaagaatggtggctatgtgcccccagaagcccgccttccgccgtgtatgctggcctctattgccctccctttaggactcttctggttcgcatggactaactctccatccgtccactggcttgcaagcgtcgctgctggagttccgttcgggttcggaatgttgcttgtcttccttagtgtcttcaactacctgatcgatgcttacaccatctttgcggcatctgtcctggcagctaacacgctactgcggtcattattcggatttgcattcccactcttcaccaagtacatgtacgaagacctggggatccattgggcatcctgtgttccggctttcctggctcttgcctgcgtgcctttccctttcctactctataaatatggactgtccatccgaaagcactgcaagtactctgcgcagtctgaggcctttgttcaaaatcttgttcaggcaatccaaaaagcccaggagcctgccaatattgaacctgagatgtgcgaaaccacattggcaaatgaggaagccgaatcgctctctcacgacaaggagagccccacggatgtccactcaattcatcacactctttcacgaacttctaccaatgccacgcatgccatgcatcgggtgcccacatacgaagctaacccttacgacattgaccgcgttcatacacgagagtcgttcaaataatccaagccatccgtcatagaaggggaacatgggcgttttaaaggatctccgaggataccaaaagagaaaaggtccaggattttggacttcacgttttgtaatgttgcattgctccgtcttttttcttttttcttttttcttttttctcttattgtgttccatataccatagatcgcgttgactgctaattataattgcacttcaaggttttgtaatcttgcgttatcctgcttatacatacgaagatctgtgtagggtttatgcaccctacgttgtagagactgggccatatgcgagggcgagtcacgaatttacagcgaaatgtaaccagtccaactcattctcgtatacggagtaataatcgataaattagttctatcgtagatgcaaaacaaaacattcactttttacagtccatatacatgccaaaagaggaatttcaataccatgacggctgcgaacatggggaatacaaagcataagatcaaaccagcaagatcccaaaaaagcagaccgaaaataccaccgcaagcccaaagacgcatatttacaactcgctatgtataaaaatctcttaacggcgagaaacacagcacaagataccagacttgcccaggaaccagagggatccaataaagcggaaaatcgacagaccggcggtcgtccacagaatagcggcgaaatacttggaggtacgaagggtagaagtgttctttgaatgttagtttatgccacagcctggagttagacaagatacataccgtgagacagagacgggtgatgccttcactggtgatacacagtgcaaggatcaggttgctgaaaatccaaatcaacaccaggttggttcggaaagccttatagccatcatccatgcttggttcgtcattatcttcaggctcaacatatggctctagtgctctcttgaccgtcgattcgaactgactgtcgatatcggcctgtggcttatcgacttcttcaatgaagtttgacttggcgtcgtctttcttcgtctcagcgacggggagcgaatcgcccttgtcagaacccttggtaccccaggaaacgtcatgccagttgcagaaagcgtagaccatcaggatattgatcgaacatgtcataccggcaaagtacgcccaggaggacgtgaacatatgccagggatccatgtacaagaaacttgcgatgaagtaaataccataagtcgaaaccaaagcgatcaggacgataccggccccggacgaaccgaagaaagactttaggaagtgggaaacacctcggtccatagagaaatcaagcgtgcctccagtgaaagcattcttgacaaggtagaatgataggaccatgatgtaagtttgaacgatactgaaatacatgaacgaaagcgtgtatgcgagacgtgaactgtttcaaatgtcagtttgacatgatggggtgatttttttcagattttagcttaccctttcggtcgatttcctagcgctaggatgaactggagcatcaagaagaagatgtatccgtacttgaggaagttgttcacgattggcgtcgcttcgttaccgaacggccatcccctattcttgttggactcactaggagttccgacaagatccatgatgacagtagtagtcagccagaacgaggctagtacgagttagtatgagattcaccaaagaacacgagatccgagacataccgagagagaaccaggtcatgacaagacccatgaagttgtatgtcatttggatatgtaggaagaacagccgtaggaggttgtggccactcttataaatccttccaaaatgcatcattgcgtacaaactggcggcgaacgaaccgttcaaccaacgacgtcgctgactgataaactcggctgcaccctccggcacatcagtctcgccctttgacgccttcacgtaggttagatgccatttaaatccagcctttgccacaagctcgaaacataagatacggtcctcggcgaggaacatattctttttaaagatattcatgccctcaatacccttcttacccaactgctttgagagtgtatgatcgccgtggaagtactgctctagcgggcgacccataatagcgcgatagcggtacgcggagaaggcacccggtaacacactaacgtacccgaaggcactctctagcggtttgtcaagaatattggagatcttgtactcgaagttttgtgcggcgacgagggggttcatcaagtttttccaaccttgtcctaacattgcgtgaatctcaccgcaagatccacctaggttcttgtcattgtagaaagactcccacaatgcaaggagtgatttctttcccggtttagttccggcatcaatgagaatcacgacttcggggttaaggattcggctgaaaccgttaaagagccagcggtgggagttaatctttttactgttcttctgcttcagacagaaaatcatttgaacgggaggaaggtttgatgactcgttgccctggggccggatcaactgttggcttggtgtaactgagagttgggtggtatattcgaacttgatcttgttagtggattttcgtcggccacaaagacaccgggaaagagggtagactttgccaaggtgaatcaagactataagaactcacgatgtgtgcgacggtttcccgaccatcgacggagcgcttcatgatgccatcttggtagataccaacagtggccaataagtcgagtgtatttttgtcgcaaggatcaataccatcaaaaaccaaggagcacacaatcttttgccaggccgggccacccttattccagaattccgacttcttcaaattgacgatatctcgaatgttctgcatgacaccgtggagcgtccgcgcggtcagaactttatcttcgttgtaatatgtgatagcgatcaaaagctcagtgtgtcggttgtacatagccggtcgcagattgtatccgtttcgtagggtgaactcgtcaggatcacaggtggccgcggtatctgtgtgcgatcagctcgagtcgcatgatcaatatttgacacgaagacttacaacgcagatgcgtgaattcttccgggaagccctcctccgattcccgatactccttctgtatcgcattctggatggcgcttggaactggatagtcgacactgagcacagagccctggaccaacttgatctttcgcgtagcataacgccgcagccctgacacaggtgcctgtcggttttgccaagcttccgacggagtctcagacatgggtgattgaatacccgaacgacggctgttgagtcctcctgcggactcctggtatggaccatcggggaagatggtgactccggggtcctgtagtgtgtagcgacggagggaatcggtcgaggcatatgggtcatcgaatgaagcgttgaaagggctaggctggtttcggtaaagcaaagactgctggctgtcgaggttctcgggtttctcctcgtaaccgtacgcttgctgtggaacaaactgaattagcatccactgctgtcttggtcggtctcctctgtttgtttgttttttttttttgttccgagtcgctggtcactcacctctcgtggaccatacacgctagtctcgctggcttggggagaatgagataggtcgcctgagtgaggcgagtgaggcgatgtgctcctctgaggaaaagacattatgtgtggctcgcgttccctggatttggtggaaaggaaatacagatatggttggcggggtgatattttaaggatttaaagaaaatatgagagaagactgaactgaattccaggtacaatccggcgcctcaatagcaacagcgcaacagcgcagcaatgacctcgtaggagaagttgaaagcaaggcaggcgacctgtccagagatcgaacctgtatgagaaacaatatgggacctaggtggaaaatagcggagggttgaggttcaaagacgtgtgcgaggagaagggctccagatgccatctatccaggagatatttttggtgcagaatttgattggaggtgccaacgatgtgggctgtgaaagggcgactgaggtggaaccccagcacatcagcaattgtcgttcgccatccaccctttctgaggatccaccatggagccgtccgagacaggacatacataatgtattgggcattgccaaccgcttttcccctgccgatgcataaccattacctgcaagtaccatggtaccccaaccaccggatgattcttccccttgatcataattctctcggtatccaaggtatacttctgtacgggtatgggatttgactctctcccgagccttgttatgacaaacataactcgtcgaacatgtaacaggctgcgggtcaacgatgccatgcgtcatgacattggtcaacaggtgtctcctatgacccatcacaggccccctcaattaatatttgctgtacctatcccttctaccatccgaaacacccctgagcgatcttgcaccaatgtacggagtactcatgctcgtaagcacattggcaaggcgtctctgccaagcaatcacagcgtgacgggctgggggtggcgactcccggagatgacgacgaggcgtcatggaacgatcggctgtcttctagggggctgaattctgaatctgcaactggcttacgagggtccacatatgcagccatcgttataaatatggtatgtggggagtgaaaaatagagaaagaaaaaaagaaaaaagaaaaaaaaaagaaagccgctaccacagcaacagagagagagacatgttgggatgccgtgtgaataatgtgtgtcatgtgcccggtcacgtgctccaccatatacgcgtacacaacttattatgttcccttgcatatgcgtacactgtacaagatacatatacaaagtacactaacacgtacgacacatccgtggacccttggaagaggaatatagctgccttggtgactatcatctatttttaggtcttagaatctgaaaagttgaagtggtcaaattctctattaatacatattttcccactttgaagccataaatattgtatcaatagtttcatttttgcttggaattgatgtacttatttctcttgtgcgaaaacattgtgtctgttctgtttctctaacttacttggtgcatctattattatgttcggcctctccgccctcacccgacatcggacttcattgcgagcgcagcctccccgaggacttaagtgacggacttaggtgacgagtcttgtcccgagaggctgaggttgagttgttgaatcacttttaacctaaatgtacgggaagcttcatcatgtcccccgtaatatcagatgagttggcaccagatcgttcgaccttccaaggttaccgaggtcgttatttgataatgccgcgcaacatgcggggtaaacgatctatctacctaggtattactttacagagtacgttgcgcgcttctaaatcgtcattcgagtaaattttcaatttgatcaaaggctatttattacctcctgtgcttaacgatgtcgcctcagagaccatcgtttgatgccctacctttacgcaaagatggacctccagggaatgcttgggggatgtttggcgatgaagatcagatgggcatgctcaatctattgaccccggaaaacaccgccgcggctgctcgcgagattgttgacggcgtgcgtgtctcaacagattgggctctcaatagtatggcgaccccctgctttggacggtcttcgttcgagcatatcatcaagaacaaggctccccggatagtcaacgatgatatcttgactttcaacacccagagtagtagtcaatgggatggtttcagacattatggctcaaagcaaggaacttacttcaatgggtgtacccaggacgacatccaaaattccactctaaatggcatccacggtaattccctctgatttccaaacttcggggtttctactaaacctcccttagtctgggccgataacggcggtattgttggacggggtgttctgttagactatgcgggctgggcggcagcgaacgggaaagaagtgaattgctttgaaacccagtcaatcccggcctctgtactccaggaggtagctgctagtcagaatactacattccggccaggagatatcttatttattcgcacgggctggacccgagcgtacgaacagctgtccaaggcggaatgccagaaactggccgactatgcagcacctccagtgattggggtagaatcgtccgaggccaccctgcgctggatttgggatcttggattagccgccgtggcgggagatatgccgagctttgaagcatatccatgccagaatcaggttttctctctccatgaatggttgctagcgggatggggtgtcccgattggcgaattattcgatctcgagcagcttagcaaggagtgccgcaagagagaccgttggacctttttctttagtagcgtgccattgaaggtgtgtatagataaattctacttctgttcccaactgaccacattcatcaggttcctggtggggttgcaagccccccgaatggcgttgctatattttgaccataggttctttcgtcttttttgatcatacatatcatgcggagtacagtctaactctttgggatagcgcggaatgcaagtgggggtctttacaagttgtacggaaatatagtgaaaaatatcagaatgcaccagtcatttccagcccagacacataggtataattagacgaaacaagtcatacaggcgattgattcccttctatcgtaccatttcaccgtggggaagtcgggccggagagataagtgaaaaagcggagaatccggggctttccgtgccggtctgggttgtgtgtcattctacaacgtttcgccagtctatgttgtatgcagatctagcagatctaaacacttccaagacctagcttaaaaagaaaagagggaaatggtccttggaaatgcaggcatctcgcgccaggcagaagatcgctcaaaaaggtcgatggtagcctgtaaccgctgccgttctagaaaaactcgctgtgccggcaatccaccccacccttgtgcagcatgcgtggatgcggacaagcgttgcgtatactcagaggccgagaagcgaatcactataacggaaaggtgaagtcggtctaagatcgtcgaaaagagttaatgttgactctctttacagctactatcgccaactacaatcgcaacctcctgcatcgcgaggtaggtttcatacctacccaggtggtcatctggacgcaatctaaccacccaggatagaaggtagtcacccaacgccgtcaagtgaaccatcgatatccaaccgttactctgaggggccatcagaacgcgacgactggtggtacaaagggacggacaatttgttcttgaagcggtcgggtgaacatcgtacgcgttgagctggaagataatttatttctattatcttgctaatcttttctcagatttcgtgggtgcctcgtctactacacatctcgccaaacggctcaatcctggctccacaaaccttgcatgggatgtgcgtccactttacgatgacccttcatcattgagaagaccagtcgggggctcattgcctcaattaccacctttcgagtttgccaagcgactgttctgggtacaatacgcttacatcggtaccatcttctcccttatcaaacccttggagtttgaagaacggctggatctagtctatcacaaaccacttgacttttcacatcgtgaatcttgcctagtatactgtcaaacactgttggttatttcctttggcttgatgtatagtgtgaaccagtggattggcgaggaaggtcctcccggcttcaaatatttcaagcatgcattacgtttcttgccagatatccacgaagagggctcaattctcttcgttgaggtactatgctatgtggcatactatatgcagaatctgaataggcgggatgcagccttcctctacgtatgtattccttccattagctttccgctgtaccgctaacgacgtcagattggactttctctgcgtatggctatctccttgggtctacaccaagaggtgtctgatctttcaataagtgaatcagatcgcaaccgtcgacgtcgggcttggtggtctgtctacagcttggaccggtaatttgaccaattcccttacatttctgagaacaatacttacacggatagaattctctcggtcaagtctggtaaccccattacaattcacgatgaagacattggaataacttggcctacagctgtggtatgttgccttccatggtatgcctaggtattcgctgatttggtttttttcgatcaagggtggatcaaccgatccatggccatcgaccgttcttattcattatacacaactatcccgtatattgggacggattggggaaggtagaaattcttcttgctttttgtcgcattgccaagctgacctagatggccacatcagaaatctacagaaagaagcctgtatccggatctaacctcgttgcttctgttcagagtatcacaaatgacctctctggctggctgcgacaagtgccagatcgactccgcatcgatttcaacacactcaatacccatatcaaccgagagtctgtctcgatcaacttgcacttctactcatgtgtgaacatgactgcgcgcccgttggtcttttatgtcatccaacggcgactcgacgcggaagcctttggatccacaacagaagactggaaagaaggactggctcccaataccgttgccgtcattgacagctgtatcacggcagcgcgagcaaccactctgatcatggatgcagctgcaaaacataatctcattggtaagcgatcgcaatacaaccccatctcttctgtcatgaaaccatctgattgacgaacattctagctacatatggataccttgatggcgactatatcttctctgctgcactgctgctggttatggtgaatgctgcgtttccgcccaatgaagtaagtgcccgggcaatggagaccgcactgaaccttcttcgcggtatggcagatcggggaaatacatatttggattcgcgtcactcattgctgttggaattacgggcggccattggacctagacctgctgaagagaaggatactgatgtggcaagttctcttgctgcaggtcaaatgggccctgtgacgccaatgaccgagaatggcgtaaatccatatgttctagatccgggtgcggagttagcagcttcagaagagcttacttataactggccagagctgccagatctcccttcttttcgggatatcgccttccagttagatctaaacgatgatccagcactctgggaaggggcattggatcaaatcgacattgacatggacactgactggattgagaatactctaaagcgatgagaatgaatatatatcactcacctcttatcttatgtgctagttcttagttctgatgtagcttatacaccacatcttatcacgatctgcatccgccatgcgactccgattgttgacatatgcttgcttactttctatttgctatttgctatctgcttctttccttgttcataagtggtttgctagctaagtcagagatcgatatttgtatgtcccacttctgcatttactttctcttttttcttcatcttaattattttgaaaggtgcactcctcagacctggcacgtcacatgtgggataaattgatgcctgaggcccatgcaacttatatgaatatctccacaacttcctaactattattattatcattatgtagactacacatgtgcccgctatctgcccctccatccccaatctcaccccgcggcttatcaagctgtggaggtatcggcccgaggaagccgaaataggagtcatcggcccgacacgtgacattcatctatcatttagaggtgtgttgggatatcggcacaagctctgtgagataaatgaatatggttctctcctgaccttctttgtctgttgttatattctttccttttttagaacccactcacatcttcccaactactagtcgcaatgtctgactcagggaagatcaccatctccatcgatcgtggcggcacatttactgatgtccacgcgattcaacctggccgtcccgacattatcttgaagcttctctctgtcgatccttctcattaccaagatgccccgactgagggtatccgtcggattctagagcttgccaccggggaaccacacccccgaggccaaccattgagactcgaccgtattggttgcctccgcatgggcacaaccgttgcaaccaatgccttactcgagcgcaagggtgcccgctcagcactcttcacgacgaaagggtttcgagatttactgaaaattggcgaccaatctcgcccggccatttttgacctatcaatggctcggcccggagtactcccggagagtgtcgtcgaagtcaacgaacgtgtgctgtcgtgccatccttctgctgatagcgcttgcttctccgattgccgcttagtagaaggaatcaccggcgagaatttccgcgtggtgcaagaactagacctcgttcaggtgaaggcagagctccaacgactaaaggagcaaggaattctgtcaatctctgtggcgctactgcattcttacgcatatcctgagcacgagcgtcaaatcggcgagctcgctcaagagatgggattctcggtcactctctcttcaaaccttcaacccatgatcaagatcgtgcctcgtggcatgtcggccgctgctgatgcctatcttacacctgttatcaagacatatattgactctatctcttccagttttgaaggtgggttggagagtcaacagaaatgccgatttgagttcatgcagtcagatggtggactggttgatttccgcaaattcagcgggctgaaagcgattttgtccggccccgcagctggtgtggttggctttgcagccactagctgggatcccaccgagaagactcccgtcattggtttcgatatgggtggtactagcacagatgtctccagattcgatggccactttgagcatgtatttgcctctaaggttgcaggtgtgataatccagtcccctcaacttgatattaacactgttgctgctggcggcggctccatcctcacttggcgtaatggcttgttttatgtcgggcctgagtcagcaagtgctcatcctggtccggcatgctaccgtaagggtggccctcttacagtgacagacgccaatctgttcctaggtcgccttctgcccgagcacttcccgaagatcttcgggccgaatgagaatgaagctctagatacagagacgactgcacgccttttcaatgaactcacacagaaagtcaacattgaacgccggcagcaaggccagtcggaattttccccagaggagattgcacttggtttccttcatgtggccgatgaatctatgtcccggccaatccgtaacctcacggaggctcgtggctttgagacagcatctcatcatttggcatgcttcggaggtgctggtggccagcacgcatgctcagtggccaaaacgctcggaatatcccgcatcatcattcataagtattcttccgttctatcagcatacggccttgctctggcagaagttgtcaaggagtctcaggaacctgtttcgtcagcctacctatcttcacaatctacacttcttcaacgcctcgataacttgtcagcatcagcaaccaaagatatggaatctcaaggtttcccctccactcaagtgcgccatgagcagtacttgaacatgcgctacgaaggttctgataccagtctaatgatccggaagcccgagaactcagacttcctggaagcattccgcattcgtcatcgccgggaattcaacttcaactctgaccgacctgtccttgttgatgacgttcgagtacgaacaatcgcctcttccaaggtgcggactgagcaaagtcccttggttcaactgaaagaagccgatctgcgagatgtcgcgccggctttaaataccacttcagcctactttggccagttgggtcgggtggatacaccagtttaccttctcggtgcattggagaagaattcccgcattcatggcccggctatcattattgatcaaacccaaacaattgtcgtggctcccaacgcagtggcgaacctgctcgatacctgcattgtcatcgatctcaatgacgaaccaacctcatctggaagcgccctgtcatcggaaattgaccccatcaggcttaccatctttggacatcggttcatgtctatcgctgagcagatgggtcatacgctacagaaaacctccgtttcaactaacatcaaggagcggctagatttctcttgtgctctattctcccccgacggaggtttggttgccaatgcaccccatgttccggttcatcttggatctatgcaatttgccgtgcgttatcagcatgagaagtggctaggcaacctgaaggatggtgatgttctggtggccaatcaccccagttgtggaggcacccatctgcccgatatcacagtaagtcaccttcatattgactacatcgaatactaatatatctataggtcattacaccggtctttgaccgacctggtggctccgagatcatgttttacgtggcttcccgtggacatcacgctgacattggtggtatattacctggatcaatgcctcccaaatccaccgaactgtggcaagaaggcgccgccatcgaaggtgataagattgtcagtgatggtatcttagatgaggcacggttgatcgagttgctggtcacaaagccctcgaaatatcccggctgcgttggagcacgctgcattagcgacaacttgtctgatctgaaggcacagattgccgccaacactcgtggaatcagcttgattcaaactctgtttaacgaatatggaactcagaccgtgcaaaagtacatgtacgccatccaggcaaccgccgaggctgcggtgcgcaatcttctcaaggaactatatcagaagttcaatggccagccattggagtcagtcgactacatggatgacggtacccccatccgattgaaggtcaccatcaacggtgccgagggatcagccatcttcgacttcgagggtacaggccctgaggtttatggtagctggaacgctcctattgccattactcactcggctattatctactgtttacggtgtatgatcaatgcagacgtgccactgaaccagggatgcttggcgccaattgacattcgtgttccatcgtccagcattttgtcaccgagcaagactgctgccgttgttggtggcaacgttgtgacctcacagcgcattactgacgtcgtgttcaaagccttccaggcttgtgccgcgtctcaaggctgctgtaacaacctgaccttcggtagagacgccaagctcgattcgtccaccggtgctgtcatcacacctggatttggatattacgagactatcgcgggtggcagtggtgctggcccaacttggaggggtgagtctggtatacaagttcatatgaccaacacgcggatcaccgatcctgaaatcctggaaaagcgctatccgacgatgctccgtcagttcgctctacgtgagggctctggcggccagggtaggaaccccggtggcgagggagtgattcgcgacatcgagttcctttcaccaatccaatgttcgattctgtctgagcgccgtgtccatcggccttacggactggaaggtggccaggatgcacagaccgggttcaatctgtggatcacgcgggatccagatactggcaatgagcgccgtattaacattggcggcaagaacaccgtctcaatgaagacacacgaccgggttgtgatcaacactccgggtggtggtggctggggggctgtatgaataagttgtatagcgagcatgatatttctagtataccaatctcaattaaatacagttagagatacaatggtgcttttttggcctcatgaataaaatcacaaaatttccttttcacaacttagactttccaaatactggtcgccacatttcattcattaatcggctggtgtttaccatgtctggtcgcaattggtcgagggaagagactccaagcatcttcatggtgatttcaagttcttcggcgatgactgccaatgtgttagcttggaattgatttgaataccggtcccaacttactatctgtacatctttccactccttcggcgccgtatgccgcgagggcatagtagtaaggccggcccactccaacggcggtcgctccaagacacaacgccttgagaacatctgctccgtcgcgaagacctccatcaacaaacacctggagcttgtcgaaagcctccgggtagtatgtgcgaatctccaggagcgtcatcaatgagcttggggcggaatgaatctgcctgcctccatggttgctcaacagaattccctgcacaccatattggacggccagcttcacgtcctctacactttgaacccccttaagaaccagtggcccaccccactctgacgaaatccagtccaaatcttcccaagtaagaccaccatcgaccgagccgggaacctggcgacccccaaatgctggcgcaaattcgttctcaccgtgagtgtctcgtgcattttcggtcaaaccagcgtcgatattttcttgtgcttggaggtagcgatcggcagtacgctttcccagggttgaagtgtccaccgtgacccacaagctttggtatccggctgccttgactctttgaatgagtgacttggcttttgtccgatccacaggcacatagagctggaatgacaagttcgaagggctttggttgccaagtagccgttgctcgtccagatgagcatccatgatctcctcgagcggcttcgtagatgctgtactgatcatggtgtgcagtcctttgcgggtagctcctctcaccagcaagggttcagcgccagggtgtgagctgcccagtgtacccatagctgatacgaagaagggaaactgggaggtatgtcccaagatgttccttcgggtgtccattgaatcaacacttctcaagatccgagggcgaaagttgatcagagaccagtcatccagattggttctcattgacaggcccgtattagctgagcttgatgcgtaaacccatgacttctccgacaggacattctttgcgaccttctcaaagtctgtcgtggtgacacatagagaagaatcgggaattttgttgattgccatcttttttatcgtagtagcttaggatatgaagcaaaaaaaaaaaagaaaaggagcatggaacatggaacatggaggctaataaagtatagaagatctgataacgggcccgaagtcggccccgatcggctactcattccggctcggctatgtccatttggggtaagatcaattgccgaattgttatagctcttgaatatttacggagtaaatgtagacatatacacattctcccctgagtttccggatagtcatctctttttgtctatttttctatatcggaaatgaggtcccgtatttatcgaggaacgactaccacgaaatatgtttccatatgggattatattctcaaaatggttggacaatgagcatattcatacgtcaacattctcttctgcgcatttaatgagggacatagagtcgtagccgccatttttattgatgtagatgcgaacatggccattttagaggaaattagtaactaattgaagagtcacaaaccgcagatttattgcaggatctggtcccacatcatctatccctggcttttcagatttttgcgataatgtctccagctcgtaaacataaaacaaatcgacagcacgagacccaatgacgccagtccaattcccatgtacagcgcaccgcggtaaccccgtagtacattgcgccctccatcattgacatgcgtttctaccgtgcctgcaaatcctaggccaagggagatagaatagttgaccgttgtagcaacgagggaagcggccagtccttggtggtgccgaggcatggcgttgctcaatatcagggttccagagggaaaagacatgtccctaaaggcgaatgattaatgacgctgaataggaccaaatctaatgacgcaagaataagaagacttacattccccaggaggttatcaagctcaccacaaatgcctgcgcccagtaaatttgatcgacaggtacagtggcgaagatagagaggcctgcggtgaaaaatgccattgcgcaaaacatgatgacgctgggtggcaggcgaccaagtaggaaaccagtgatcaaagctgccacggcaccagaaatagcggccgctgaccatttggccgtggccaacagtggagaatcacctttgatgacttccatgaattgatagaagtagtagatgataattccaaaactcgaccagccggctgcgatacacccaagtacccacgccagctcagtagtaaagactgaccgcgggagcaatggacatagtgccttgcgttcgattaatgtaaaggcgccgaggcaaataaaaccaactatgaggagaacataggtgtaagggttcttccagcccacgagcggggcttgattccaagcaaagttgatcagcaccaggcctgaaattcctgcagtggcaccaggtagatcaagacgttgccacaaacgaaggttgtcgtcgaatttgggttggggggtgtgggggatgacaagccatcctatcaaggccatcattgcacacgcgattcccatcacccagtatccccagggccaccaaacaagctgagcaaagatagaagagaaaacacctcccacgataaaccctccaggcgctgtagccccaaacgcactgaatatcatttccttgcgtaggcccggccgatatgttcttccaagaattgcaattgcattaggaagtaacatagcgggaccaatcccctgaagggcacggcagcaatcgaagaatatctgattcgaccagacactgaacccagccaacagtgaccagatactgaaccaacagaaaccgatcacaaacatgtttcggtgaccaaagacatcgcctagtctaccagcaacaagaatgaaagtgccaaccgttaagctgtaggcggctgcgaaccagcttaaatcggcaggatttgtggtgccgaagctatcgccgatgatatggactggagcaatggagatactaagaccagcttgagtcatgaattgtgccatacacaccacactgacgaagatggtttcttgaaaaactgatttaggcggttccatttgagactgagacgtttccagtcgggtcaaagtttcgtcaacatcattttgtgtgggcaccttgtttagattgatatcgttctcctccgagtccgacattgaccgagtgcgatgattaagctccatagcgaaagtcaaatacgcaccaaagaagaagctgaataaagatagagacaaaaataagagacacaatcgaaagaaaccaagctggctttgtatctgatccaccaaagtggaatgccgacttcaacatcttcccgtcgggcccgatccgacggaattggagatgtcactccgaatctgtcaacttctgttatgacagactcattgatcgtagggcctaatctgtgtaaactggaggctaatggtatatgcagcttcctattaataggaccaacaattagattcaagctgaaaaagcattgatctatacaggtacctacatagatgatgtagacatgtataggtgctgaaaagaagtacacaaagaactcctttagcattttgatcgaaagcattgccaaatctcaacttgaaatgtaattgaatatagtcccttgtaagctctgaatatgttaaatggtatacatctataggtggatgttatggctatacagtggatgctccaggctggatgagggggtgcttagtaagtatcacatgcatggagctgccccaggcggccctggttctttcaactttcgctttcgctttgttcgctttcttcgcttctcttttgcatcttctcattgcaagtctcaatatgtctgtcacgatacccggttgatcagccatagggcttcttctctaatatttattcccttctatctccattgctgcatctctgcaaaccacccaagaccgcgttatcgcatcttccccgcgaacaaaaaaaaaaaaaaaaccaaaagacaaaaaaaagtgacgtggagtccaaggacacggtattgacctccatgccaaaatcaccacctattgtgtttattgccaggtgaatatttactccgattgcactgcttccgctactcactagcattttagacatggtgcccgcctcgatgctgcagataaagattggcacttaacctctccaagccctttcgatccgcccctttcctacggtggatggatacagtctcgggcacttggtgtacgtataggaagtctgctaagggcccgacagttcaccggggaagatccagagagtcagcgcagccatcacccgacctcggataaacaggcaaaacccacccccgcatcttcggacctgtcccatcgatataacgtcattgtccatacctctccttaccttcggtgtctgcaaactgcaataggggttagtgctggtattcgccaagcctcggacacagaagcatccgaaacaactagttcagctcctactgcccccacggtttcatcaatccctgaccagcgatgcctgcttcgcgtcgacgcatttctgggcgagtggctatcaccggattattatgaccagatcacgcccccgccgggctcggacagaatggtggcgtctgccaaaggggaattacttcgtcgtgccgaggtcatcccagccaccgctggtttgacaagggcgttgtcgggccatttccctggcggttggcgcagccagtctcatcctacctcgccggatgatgaagaccgtcgtttgcattccgcaacatcccagcgtcagcgttccaccacccatgacactccccagaaccctacccatcacaagcatgcaaagaagtctctcagtcggctagaaacggacctgccgcctactgtagacgcatattacgtgcccccaactcctagctatgccatttccgcgtcggaccccattcctacaggctatgttgctcatgcacgaaacgcatgtacgaggatcgactaccagtgggacagtatgcgcacgccttattggggcacagggggcgagttcggcgaggaatggagtaccatgcatgaacgagtgcatgatggatttcagcacatgattaactggtaccgggaacaggatctacctgaacacggttctacagcggagtcaagcaaggtaaacgacggtaatatacaaacggtcctcgttattatcacacatggcgcggattgcaacgctttgatcagttcgttgaatgggcactcggtcttactcgatattaacacagcttcactcactatggctgtgcgacgcaaccgtgtcaataaacccgcgcatgacatggatcacacgcctaaatccccagaccctgagaaccaatcggtgtcactggaatactccttgcagcttgtggcgtcgaccgatcatctgcgcccgggaatgaacccctcacagctcacctcgctgccatctccctctgtccctgtactttcaccgcctccggtccctgcctatcggaatcgtcttggctctcgttcatcgctcctccaagaaacatcaacaaatggaccacctaatactagccctcggacatggaccctggcgatgcgcccggcaactagttcaagtacttctcaaggtgcctctgggctgtggaactcgatctcgtcgcctaaagcagatgcagaggacaaccttgtgccgaacttcggtgatcgaccggtcagtcaagattccgccctctctgataggtatgacaggtctgcggatcttggctggacgaagcagttaccacagcggacggtgtcgcagcgtggtttatgggggagtgctcagccattggatcgtgaatgcggatcgaagcggcgatggacggtggcagaacagtagctgtggaatgattgtttttattggattttaggatacctcttgcatggcgttgtggtctacttctaatttttttggcttttcgatattcaaaatattcccatgacgacaccccaaccctcaggcatctaccaggcatctaccaggcaccggtaccgtggcttcccctcacgtctgtctctccgtctctccgctctttgctctcctctctcctctcttcctttcaagtatctcctcccaactttcccataacatcgagactttcatgtcaagcatcggaacagacggtctttccgtcacttattcctctgaccgaactgggtctccggatctacgcttgatccactataatgatgtctaccacgtcgagtatgcttgtctctccatccctttctccccctagcttcataaacttcaatttgggatgatattaaattatctcgtatagatctggctctgcagagcctgtcggtggggtgtctcggttccaatcccttgtaaatcactaccgttatcacccacagttcgccgggcagcccgatatcctgaccttcttctccggcgatgctttcaacccgagtatcgaaagtacaatcacaaagggcagacatatggtaccgttcctcaacgctgtgggcaccgatgtagcgtgtgtgggtgtgagtatggcaaccagctgcccgtcaggcctacatacaccgctaatctgagcacccacctagaaccatgatctcgattttggagtcgcccaattccgccatttggccagccaatgtcactttccttggctattagcgaacgttcttgacccagcactaggggcggataccccaatagccgactgcggaaagtctcggatgttgacatccaatgggctcaagatcggtgtgttgggtcttggagaaagagaatggtatgcgctcctagaatgtatcttcggatgctttcattcctttgcttactcgggtctaccttaggctcggcacaataaactctcttccgcctgatctgatctacaaatccgcatcccaaacagctcgagtgcttgcgaaacagctccgagatgaaggagcagatctcgtcatcgctgtcacccaccaacgtgaaccgaacgactacaaactggctaacaacctgtcacctgatcttgtggacatcattctcggaggccatgatcatttttacgcccatgctgttgtcaatggaatccatgtgatgcggtcagggaccgacttcaaacagttgagttacattgaggctttccgcaaaccggacggcttgcctggttgggatttcaatattgtacggcgagatgttgttcgctcaattcccgaagatcctgatatggtggcgatggtgacccgcctaacttccagcctcagggctaaactagaaaagccaatcggatttacggtcagcccgctcgatggccggttttctactgtgcggcagcgtgaatctaatttgggaaattttgtatgtgacctgatgcgcttctactatgcggctgattgtgccatgatggcgggcgggacaattcgcggcgatcaaatctatccgccaggaatactgaagctgaaggatctactgaactgcttccctttcgaagaccccgtggtgttgttgcgcgttccaggccatgcactgctagctgcactcgagaatggggttagccagcttcctgcactcgaggggcgattctcgcaagtatccaatatcaagtacgggtttaaactggatgcaccgtcggggtcacgaattacattcgcccgtgttggcggcgagcctattgacttacaacgcgactatcttctcgccacacgcgggtatatggcccgaggaaaagacgggttcacgtcattgcttatccaatccgaaggaggtgatgtggaagagcttgtgtctgaggaaaatggcgtgctcatcagtacaatcctacggcaatatttcctaagtcttaaagtcctcggaaaatggaaccgctggagcgccagcttaggtcggcactggagtattgtgcatcgtaacctgcatggtgagggctggctgaagccagcatctcctaaaaaagagaagaaagcatgcgacctgctgaacccgcggcctgcactccggcggacagcccggtcagcatactactatggtcgatttcccgaagaagtcgaacagggcaccaacgttatcgccggggacgagacgaatggtaatgccatggactccgactcagacgaggatccagagattctcacatcctcgcgaccaaccacaaattacgtcactcaaccagcgaaatcatccgctgaagaggagtatcttctacaaattgcgcggcgagttgtccgaaaatggatgcggcacgcaggtctgcagtgcaggacgttgaatactatggacggcgaaggggaattcactccggcctggacgtcgggaatctctcctcgactagagggacgcattgtggtagagtagacatgctcctccacttccattccgtctttctcggattttctggtttctcttttgggtttccttttgttttcggggattttcttgtcttcatcatatttgctgttctctattgcatcatgcatatgcgctggatggcctggcgtttccggctggacggaatgcatcgataccctgaatgttttcgatatattctattcagtcggtcttcttcttgggaacctcctttcgtaacaagtagtctcctcccctccaagccttgtaaactccgtaaagaccacaaaatggccagacgtcccacagagcacgtttgaccgatcctttccacccactctcgaactccccccgatgtggaccagggagatcagattcatgcactcggaccttttcatacaaagacggaaggtgctgtgcatggtatttttcccgcagagaatcataaccgggcttgttatagatggaccagaactcgtcctctgtatagtaagtatgtgcatatagccatttctttcctccaagactgtggaccttatgttctagccgtcgattttgagccacaaaaccgacctcatccgtggtggcggcaggcccccagattccaaaattgaggagtcgtgtcctctgtgcatcgactcctttgtcgtcatctgccggctttccttccaaaccaccggcacttcctggtggtagcggacagagccaaagcggatattggccaaagttttcagggcggtccagccagtccaggaactcggcagcagtggatgttggtacaccgacgtcttggataatatatcgacgcgcaagcccgctgacgtgtagggcgtgatacatcaccttggtgtgcatgaatcggttgaggagccagcgtgtaagaaaggtgaatggaacacagaagtagctaaaagcataacgcgcaacccagaaaccacctctatcatagcggaaaaggtagtcagtgagaggaatgtagtccactgcatctggcatgtgaggagaattctctcggtcggagatcttggattgagcaatctgttcaacgtgcaaatagaaccaatcgtcttgtcgccgagtaaagcgccgaggctttacattagaagtctgttcaacttgtcttccagcacaaacgacgatcttgtcccttgcatagacgattccgtccagatattcagtgcttggatcagcactagcctcttcaaaggcacgcaccgcgtcctccatattggaattgacatagtatttcagttccaccagtggcagtgaatttttcaatcgaatttccaacaaggtgaccactcctaaggtcccgaaggaagatgcggcgccccagaacaagtccgagcgtcgatccgccagttccgatcccatctcgacgcggtcattgtatgccttcaccacctgaccatctgccaggaccatttcaatccaattgactgtatgatcgaagaatccctcgcggaaagaactactctccccggatgtccccgagaacccgccgccaaccgagatgttggggaattcgacaacaactaaagggaccaaatcatgggccttggtggcagccactagagcatccatagagacattgggctcgactgtagctgtacgtcgagcgacatcgatctcgaggacgcgggtgagaggttctgtgctgaccgtgttggagagagatcggttggagggccgagtactgttggtagcaccatgatatatacgaaatggttgctggcgactgtggaagtccgctacccgtgctgagatttcttgtacagcggcagtatgatccatgataaataataatcaaaaagaagacaagggaaagatgagaatggaatgagaatggaatgaggagaatgcccgaggtctccgcatttagagccggacgagtgagtgtgagatgactacatttactattcatatgtttgtacgaaatcaaattcagaactaaaatatcggtatcatcaacataaaaagaaaggaaaatagaaacaaaatagaaaaaccgagcttattggacgccgactgggcgtgctccagcgagattgaccaccctaccccctccagctgctccaactactgtaggtgctcgaggctgtacccaaccgggaacactggaatcatgactctcacgtccagagatggtctgccagacgttggggaatcctgtgggcaagatgcctttgattctggcaccaggaacggcaaatcgaggctcacgatggagaaggtagccgcccatcagcccttgtgtaatcaacgatgcgaaaatcgattcgatctcttgcatcatggatacatctgcctctgtcctgtcgtcggggtcatacgcatatggatccagttcgtactcgccataattctcttccgggtctccgtcgatcagttgacccggaggattgggctgtgatcgcccttcttcggtgtaaaatccatccggagctaaaaaatcaccatatttttctagtatctcttgatcagtggcggggctggcccttccatctgccccttctaggcgagcgtagtcgagatcagtaggttcggaaacgacttgtgatccataaaagttggaggacgccatagcatttgccgggccatttccggatgctgcgtgctgcgcttggagccatcgtgtcgccacaacgagctttttaagattgaggattggtggaggtcccttgtgcgcctgcgcctgcggacctccgtacgaacctccatacatgaaaaccttgcgtgcaaaagatcgccatacaagaatctcgcatcgatttcggagggtaaacagaattcccttatgtgcaaaccactgagcagtcggggagccaaagaagagatgttgtcggaaagccaggtaatctcctcggacaatcaatcgacacagtggctggaagtgttccgctaatccttgtgcttctggtcgtcgaaggagtgcctgagatggaaattgtcccaagataatgttgcacggaatgaggtatgagaggattaagtgtcgttggcttatggcctggcggtggcattggtcataggcggcctgcaaagcgatgcgggcgggaaagaagaggttgttggcgaaaaggtagcgcccgagataatagaggtaggtgacacgctgtgaggctgggaagtaggccaaggggggtgattgggcgctgatgcttgcaaacatttgctcggcgttgcgtagtttgccgcactgtgttccgtcagcatcaagattcgaagggaaggtgagatattcaaggataggcctccgtacctggaagagcaatttgaggcagagattagccatgaggtagataccgatgcgcttgccctccggcttaccagtagggccgggagtgccggtgcgatcggtgaggcacttaatgaacgcttcgcgcaccacgttggccgatttttccaccaaagttaccttctcgatgctctcgtcgtgagccgccagaccctccattcgtcgaatatgcgcgatcaggtccggtcgacgatcaaggcccattgccaattttgccagcactttggacaagtagagaaccgtaggaagaacgacgacacccatttgactatctccgagtgcgagcacgcattgactgcagttaacgatacggtcgagtcagctttcaagcccaaagacatgagtagaatcctcgaccggggacagagtgcgttcagaattcttcgcgagggcagcaaaacttacttgagcagcgccttcaattggttgtatgtttccaataggttatctgtgttcatatcgcgtaggaatatcaggtagagcttgacgaaagtcgggaacgccgtccatgagctacttttggatcgcggtacgagaggctcgcatcgtcgaagaagttcggcgtcacttttggggcccgggccataattctgtcgtagttcactgatcatgcgctggtaaatgtccgagagtggcggctcgagctgaagaaagtcctggactttggcgccatcgcgtttctggaccaattcctgcaaactgccgaggaattggtcgaggacaggtgtttgactcatgttgaaagcgcgagatactcggttaactggtagagtcgcaccagaagaattaatttgattgaacgatcattgtgtcgtttggcattctcaacgttcaaagaaacccaactggcgggtcacagagtcaagaggctcgtctgttgacggcattgatggcagaacccgtgaccgccctttgtatacaagtgtccaacgaggggagttgattcaatttcaattctattcaatttcgtgaagacattgggtgctttagtggggattcaatcaatatataatttatgatagcagttctgatttggttcaaatggattggtgccacttcactcggattgtctttctaccatctatctatgctccgtataatatgcaacataggatggatatattattatttccatagaagtcatggataataggtaagattttcacctacttgaaacacagtgatatcccagaaaactagacttctttgtcagtcagtagtatagtccccatacaaagccgggcaagatacatacaccaatatcacatgggacttccttacgtggagactattatggagaatatctacttctagcatagcatagcatagcatgacatagcatagcataagttatctaagtatagtctacctccagggctcgatactccatacgtgcggccaaaccaggatccttcctatgatgtcatataacttggactaacgatcacatgtgaaggagagcataacgtcacagagctgggaatgggaagtacaaatatttcgattcttcttgtccttcccaattgatcctaatttccattcacgcaagaagtatgggttctgagtcttttctctcggcgctctcggcctttatccggcatccattcgtagagacctttacctggctctacatggttatacaagccgtgttggtttacatattttctcctatacccccgccccctgcagctttgaatccaaatcttcctcgaaagagagtcgcggtcattggtgcaggcctaaccggtgtgtcttcggctgcccactgtgttggcaatggcttcgatgttcaattgtttgaatccagacccaaagaacaaggattgggaggcatctggagtgtgagttttcttgatttctatttattcctagttaaaatacctgctaatacttttacagagagtcaattccacctctgcattacaggtccacagcgtcatgtaccgtttccatccctcggtccagttcgacagcgcatatcccacccagcaacagatcaaacagcaaatcgttgatgtttggaagagatatgatctggaaagacgtactgccttcgagactaaagtcacgtccgtgaaaaagaccgagaatggccagtggatcatcaacgatgacgaagagcagtatggccgcttcgacggcatcttggccacggtaggcgtttgtggagatcctaaaatgccaccgctacccggccaagaaaagttcaagggccaaatctaccactcctccgagttggatggcacaaatgccaaaggcaaaaaggtgctcattgtgggaggcggtgctagcgccattgaggccttggagttcgccgtcaaaaatgaggctgccgagattgatgtcctttctcggtccgataaatggattattcctcgcaacatactggtgcagtctctccttgcatgcaacatcttcggtcaggaaacatcactttcgtggattcctgaatggttgctgcgcaagtttttctatcgtgatcttcaagacattgcgccgacagacaagggaatatttaccgggactccgatggccaacgacgagttgtttaaccagatccgcgagggcaaagcccactggttacgaggtgacatcgtttctgtggaagagaacggtgtggtgttcaattatcgatctaaaggcgtcccaaagggaggacctggccatgaacaactggtcgagggagatatcatcgtcatggcaactggtttcaaacggccttcattaacctttttgcccaatgagtgtttcgatgaaccctacggaccgcctaattggtatcttcaagttttcccacccaagtacccggatatttgcgcaaacaatagtacctacgtcgatgcgattggtacagtgggcaatatgcatattggaatctacacgcgattccttctcatgttcctaaccgacccattgaccagacccactgaaatgtggatgaagacctggattgacttcacaaggttcatgaagcgtctggcgcccacgggagcatttgacttctttacctatgctgaactaatctactggtacttcttcgtccttgtcgttaacccgttccgttggaagtgggcgttgttcgtgttctttggtattggccgtggcttgcctatgaggtttgtggagcaagagaactcgttccgcagggagctgaagaaacagcccgaatcaaagaaagctgattgaattgggttgctatgatattcactcagtgtcatgatgaggatacatgtgcattgaaagctgggaaggtcatggcttgaatggaaatttggctggttggttcggcttggaagacaattgcataagacacatgtattgtatgtaaaataaaagcactaagaccgcaaagtacgcctgggccgtgtcctctccttcttcggctagcttagccagaagtctgttggtgtgttcccgcgctttgtccgacagcttgtcgatcttttcttatatattcatctgaacgtcaggatcgggtttccagttagttaggtgtgcaacttttactacataggggtatacggtaaaataggcgagaaacgcaaggacagacatagcgctcacgttcaacaatatccacctgaagatagaaaatcaactccatcattgccctttaatttctggaatcttcttctccatattgtaagcccaatttccccctcgcaaaaagcgatcggggatataacgcttctcctctagccagagtataggccatagcaaagtcacacccaggagacagaaaaggcttgcaatgagatgccaaccaaaaataatccaatacccgatatgcggcatgataaacttgacaaactccgatgtttgatatagatcttcttgcttggaaatgtagtaaagcttgtggtcgccattggtcgtagcatcgcttttgaccgaatcgtacgtcaggtccaagaccgtagtgagagtcaccggagcgacatggaagggaacaagccagatggtgaagatctgtgacatattcacatagagtttgagtttatcttcatcaaaagctaaagaattatcagagtctgaagtcaaaattatgaagtccacaaccttagaagtttcctgttgacataccaatagaatggatctctagctcgatccggggtgacatgatcttataccattgaaatatctttgaaacccaccatctgctaccttcaaagctgggcacacggcagaatggatgagtaaaggatacattgttggtaaaataccggtgaaggacggtttcttgaaaagatggcggcgactgtgttagaccccggataacggtaggtatatcagccactgaaggaattagctgatgaatccaaaatatcagatcgataacgcacctgggttctccattttggtcaaaacgttcaaaggcgttgttggaaaagaaagaaagagaagatataaagaggtagttaactagcttcgggtgatacggtgacgtcatgttcgactatccaggtcggggtttaacacgtgaatctcgtcggagtcacaccggttggaagctacgccaatcaaatgagttgcttttaattacgtgacctcttctttcgatcgatgtgacataattcatagagctcataactatcaaaaattgtatttctgccagccctagaagggtacaccagatgccggttttctatcggcatgccgagtcattatattccggcggtgagacgtagaatataaacttccacccgtggacagctgtagacagtagaccgagttgatccggtgagatcataccattcgatatatgtcgtagaagtagatacatatatgcattggtcaagatggaccttgggtaatcaagaaaactccaaagtgattgagttccagaaagaaacgcctttgcacatgggaattgccccctgcaaccattttttaccgcttccagctgtcaaccttctttcgtcgcttgtcgaaaacctggcccatgccgacaccatcaccgcgttgcccgtcctcgttgcggactcgcttccgactcttctcgagtgcggctccgttgcttttggatctccgggtaagacgttcgatgttatccgcgccttcattaagccccttccattcatcaccaccgtacgtggtgtcctttccgcgacctcgtttcgccaattccttctttgtctccttcggcaatcggacaaagttggtctcttcgtaggtggtacgctctgcctcgcgctctcggtccttctttgacttgaccgttcggccaccatcaatgattgtgctgccgatactgggctcagccatgggtgcggacgacatttcagcgctgacaaattcgtcgatgacgttcgatctaatgggtctgcggtcctggcgttcgcgacgctctgtcgtaggcaaggaagttggcatgattctcgggggacgataaatgccgtctccgggactctcgacagcacccttggagggacgggccttcttctgctcggccactcccttggagaaggcagagacattgggccggtacgccatttcatcgatgtcctcctcattctcgctaccgtttacatcttcgtcttcatccgatgatgcttcgctgcctgatgtcgcagctttgcggcttttcttggtcttggtcggctgagccttctctgtccgctccgcatcctctgcagctttgatgaccttgtctatctggtacttcaatcgtccttccaaaggacggacaccacgctcgaggaatacccgaagctcaatcaatttcttgcgaatatcatcttcgagggagttgtctgtagattggctcttctcttttggggtttctttcgctgacacatttcgcagttggaagataatcagaaatacgagattttgcaagtaggaaagaaggatttcgctcttggtgtcgaggagagaaatgccgtctttgggaggctcgatcgtgacatcggagggcgcatccttgtgtggcttgggtagagaggaggcagttgtcgacagacaattattcagagtctctagcaatgtcggtagactttgagggcgcgcagacgcctgtgttggagccatgattgaaagttgatggcttatagagaacaataattcgcgaaacaaaaaaaatttggccgcttcgacgataacgccagtcacgtgtgataaagacaaggcaccaaggcactcttcgatgatcgatcgtcattgccagtctgtcactcgcagttcgcattttatctcccttcgagtatcgcgagtttctcacggatgagaacgtgattttctctttctatggtagatgcttgttgtaaacaaccattttttctttcacaatcacccattgacacactagctctactcctttcctctccgaaacaagccattgaggttggtttctaggctttcaaaagtctatagaaacacccaacatgcggttcgccgatcgagcctttcttctctcgtcgaccctactagcaatcccttctttgactacggccttttatctgccgggtgttgcgccgacctcctacgacgaaggacaagcagttccgctttatgtcaaccacctcacccccagcctctctcgcgatgaccagcttcattcggtcttctcatatgactactatcatccggcttttggattctgccgaccagcagatggtcctaaagatgtgagggaatccctggggagcattctattcggtgaccgcattcgcacctcgccattcgagcttcacatggcaaagaatgagacctgcaaatcgatatgtgcagaggccaaattcgacgcccgcagcgcaaagtggaccaatcgacgaatagctcagggctacaacattaactggattgtggatgggctgccagccgcgcagttgaactatgacggcgttaccaagaccaaattttataaccctggcttctctctgggtgagctagatgacaatgggcaggctctgctcaacaatcactatgacattgtgattgattaccataaggtgggctttggcggcaaggataaatatcgcgtggttggagtgcttgtccagcctgagtctcgcaaggactcccggaatttagaaggcggggccgctgaatgtggtaccccgggcaatgttctcgcgctcaatgaggacggcgagaccacagtcacctggacgtatagtgtgtactggaaggagtcccccacagcctgggctacccggtgggataagtatcttcatgtctatgaccctaaaatccactggttctctctcatcaactcggctgtctttgtggttttcctcgtgggtatggtcagcatgattctagtccgcgcgctcaagaaggatattgctcgctataacaggctggattcgttcaacctggaggatttggatagcacttcggctgcgatcgaagatggagtccaggaggattctggctggaagttggtccatggcgatgtcttccggtgccccgaatctccgttgctgctgagtgtgatggttggcaacggcgcccagctatttatgatgactggtgtgactgtcggtgagtagtctgactcccgctcttcttctctttgtactgatttttatttgtagcatttgccctgcttggtctcctctctccttccaaccgcggattcctggctactgccattctcctaatttccgcccttttcggtgggatcggtggttatgtgtcggcgcgagtgtacaagacatttggtggcgattcttggaggcgcaacattatcatgacacctctatttatacctggcattatattcggtactttcttcatcctgaatctctttgtttgggccaagggatctagcggtgccgtaccatttggaactatgttggcactggtattgatttggtttgttatcagcgtgccattgagcgtggcaggcagttggttgggctttaagcaatcggtactatcaaattccaatcccgttatccagacattccgatgactaacttcatttcccaatagccgcttgagggtcctaccaagacgaaccaaattcctcgacaggttcctccgatggctggtagcctgcgcacaattccatcgattctgctgaccggaattctcccctttggtgcgattttcgtcgagttgtactttataatgacctccctctggaccaacaagatctactacatgttcggattcctgttcctctgctacggcttgatgatcattacctctgcggctactaccgtcttgctggtgtatttcttgttgtgtgcagagaactaccggtggcactggcgcgccttcataggcgcgggtatgaccggaggatatgtctttttgaatgcgctcattttctgggcgacacgggtcagctttggtggattaacgggggcagtgctttatgtgggctattcggcgctgatcgccttcattgtgtttattctgactggtatgtttttgttcccatgtcttgcggatgggcttcttttgctgacttctctccaggctccattggtttcttcgccagttgggcattcatccaccgcatctatggctcgatcaaggtggactaaaggttttgctattggtgtaacatttagccttgcatttttggtcacgagagaagacataccctgttcttgtgtctgtttttgtgcccttcttttctttccaaaaaaagaatcgttctcaatgcttggagaggtctcatggcagatagatagttgtttgatatggagaaatgtatatacgcggtaatgagattgtctgccaagcccagcctcgggatgttctggacctccgtcctttctcgcctccttcaacctcttctctatcttttagaaactgcatttcttgtattaacccccttattatatctttcctcttacgtcgccggggccccccttgcgcagacatactcagccacaacccagccacacatcccacctgtttctaccccgcgtcaccactccgggctcattgcaagccatcactcccagatttgttttgaacttgctcttgatactgttctagagaactattttttgatcatgggaaagtcgtaagttctaaccatcctctcaccctgtttgaaatggcggtggaacggactccgcggatctcaggatgcgcgtcatctcgggagcaagccagtaccaaaggccccgtacttttggtctgagaatcacgctgaataccctgcctacattcaaaggagaaccctgcgctgaccctcgtgtttcacattctacagtcaatctaagctttcaccgacgcagctcgatgagctgcaaagggcaacacatttcgataagaaggagctacaacaatggtataaaggtatgcggatatatgggaaacatacgaaacatcaagtctcaagagcgatcgctgattatgggcatgtctaggatttctcaaggactgcccgtctggtactctgaccaaggaggagtttcagaaaatataccggcagttctttcccttcggcgacccgtcatcctttgccaattatgtttttcgcgttttcgactcggacaacagtggtatgatcgatttcaaagaatttatctgcgccctttccgtgacttcgcgaggcaagatggaggataaactggattgggcattccaattgtacgatattgacggcgatgggaaaatcacctatgaagaaatgctggccattgtcgaggcgatctataagatggtatgcacaatgcagttcgtgaaatcacgatacccttaaaagaactaatgagtatacaggttggatccatggtgaaactccccgaggatgaagataccccagagaaacgcgtacgaaagatcttccgcatgatggacaaggatgaaaatggcagtcttgacatcgacgagttcaaagaaggcagcaaacgggatgaaaccatcgtcagtgctttgtcgctttacgacggattagtttagattgcttgggcgaatactggcgcaatgtgaggcattcttttttggacgggcgagggggttgcattgcatattctctgtcttatctgttttctgtttctttactttttttttctcctcttgtcatatttttgattaccccctcatatcttttgtatatttgagacaagtacaaccttggtagtgaagtgtatgtatacggtagtgtctgtcaacttggctttgactttgatcggactttgacgctgtgttcttccaaagacgacaacctcctttaggcagagtgggaatggtgcgctggctttgataaggatcgaaccagtccattgtcgcctcgtatacggagtatagtatgtcacatcaaaatcactcaagtcggcccagcagactaactaccagctcttctccattctatctggaattgatgtacaagggtatcgggaagacgcaagagccagtccccggcatgcagggcgcgatctaatatactggaatgagcaaggcaaggaaacatgggaaaggaaatatgtatcaaaatcatatcagaaacaagaagaaaagcctgttgatcagatgatcaaaaaatagaagaaactcgtgagacagcgtaaagaggaatcaatatagatcaatatcagcccagatcaaccacatgctaatgaaacaagcacgaattgcacgaggtccggggtgcacggcagacagctatcaagcctcagaagcagttgcgcaagggacgagcagccttctgacagtgggttaggatcatcggcgatcaaaaaaccagctgctgcgcttcccgggcgcttcttgcgattgtacgcccgcaacgttcgaattcgccggcccgtcaccacccccgcggagtggcttcgcgatgcgcgatcccccgaagctaaaactcgcattcccatccatgctcggtaagccgcgggtggaaccttgcttcgctgcttccagacgttccttaacagcggtgagttgagcttcgaatctatcagcgtagttagtatcgagtatcaacaagcgaaatcagggagaataagtcaacgcataccggtggttggcttgggtaagcttttcttggctctcctggagcagggcttccaggctggcaatacgctcatttcttgcaatcagtttccgctcagcgattgccacctccttcttcaaactactgttttgttccacaagttgacgctgcacgtgggttaattgctcgaggttgcgctctaagaacgccatcttcttctgctgagcccggttgttcgacgatcgaaggacgttgttatactgctctcgtgcatcatccagggagatttccaactctacaacacgctcgcagcggttctgcaggtcacgcatgagagacttcttcatggcatcgaactcggtaatctgctgctgcaaggtcttgcttgcggcaccattggtggaggtccgggactggctgtcgacaagcgattgtcgcaacttggtcaactcttcatccttgcgtaaaatgtcagaacgaagatccgcggccgccgcagtctcagcctcattctttgccacgtaaacgtgctctagccttcctcggatctcttccacatcgccctcgcccaagttgcgcgtcaagagatcttcatactctcgttgaaggccatctagcctcttttccaagtctgcacggcggctgtcctgcagctcaccaaagtcacttcggtcgttcacggtcagctcggcttgtcggataaagccttgcgtctcgacaagattcgtgcgaaggtcaagaatatcgtctggtgcaatgagttcacctgcagagctgatttggtgtagagcatcgacgcgctggatgaggtcttgcagcttgcgttcgttatcggagaacacgtcgccaccgaggtcaaacccagccatcatcttagccattttctcagtcttcttcttttctttctcatcaagtgctgcagtagtctcctttgccctcattcggacatccagaagctgctgcttaacttcatccaactcgcctgtgagttccgagttggcctcccgaaggctatccatggtgatagcggcttccttgctctcataggagaccttctcgagctgcatacggagctcgttgacttctgtgcccaagcgctcattatccttgccggttcgcgcgccattctccttcatggacctaagctcgtcgcgtgcctcacggaggctgcgctccacgttgacaatatgtgactccttctctgaaagctggtcttggaattcattctcacgacgcaagaattcttcgcgctcgtccttctccagcaccaggctgggggtgctggaccgatctccaacccgtgaatctgggcgcggggtttctgaacgcgcagtctcctgcagacgtgaaggcgtactcggccgtgggccgcgggcttcagccttcgtgtaactgacaacttcgtttcctcgagagggggtccattggtccttgggaacgctgtcaccgctacgccacaggctgacttcgccctcaagcgctgagatgtagctttcgaaattcgtcatttggctttgcgccttgcgcagcagttgcttcatctccgaggagctcagctctgcattgaccttagccttgttcttgatggccttggcgcgcacaccaaaacgcaaggttgagattgtttccgcatcgttgtagctgctaggcgaacagttgataatcaaagtcgttcgagagttaccaccgagggattcttggagaattcgagtgagtttggagtcacggtaaggaatgtgtgtcgatttgccgtcggtcaatgcgttgattaccattcctagcgcacttaaactcttgttgatcttcttggcctcctccagagtctggccacttgcgccggtctttccgaccttttcgctaccagccaaatcaaccaaaaacaattggccactcttagcagacccagtctcgacattcttctgggtgactgtgatcacgaagatggagtgggagcgggacgattcctggttcatattggttgcagcgacggcgcgtgctgctcctccccggcgcataacttcgtagacctcctgcacgctagatacgtagacttccagcaatcctttaacgtaaactccacgagctttctcctcgtgaactggcaagttgtcgttctggggcacgagtaaatcacggatccgctccatgtaaatttccatatagctgacccgcacggtgtactcgatgttgctcgggctggtcaggatgctggcgaagatttgctcgatcatgcgtggaataatacccttccctatgtcatcatcgatgtcggaacccatcatcgtatatgattttccagcaccagtctgaccataagcgaaaactgttccattatatccattcaaaatatcgtccaccgtcggtcggatagagaagtcaaagatatcgctttgcgcggtgtccatagggaacacccgatcaaacgtgaaggcccctgtgttctctcgggactagaattccgtcagtatagcctcgtgagttatggcttcagttcggactcacattgatgctacatgactcttcattttcgaattcgacaatgggcttacccccagaggacaattcgaccttgttttgcggacggaacctagcaaccactatatatggccaatcagtccaagtcctagtagaacgcactttattttattatgccagtctgtgcatacccttgatggtgttcgaccccgcggacctgtggaaccatattagtgatggccaacgcacgatagggccgagcgtactcacgccatatttgtagagtgacttggctatgacacgcgcaagctagaagatagagcccaaaaaggggtaggtgggccgcgaagttcgtcagaggcgtttcaaatggaaactcgtctgttgcggtgtagtggctcggaggaggggtttaagggtcagggggtccacgtgcaacgtggaccaaaacgagcaaggaacgaagagaaagataaagcagcagtcaggccgcaaagaaagtacggccaaaccaagaagacctacaatgggactttgcaggggagggggttgacgcgaaagagtgggatttcaactgttgactgtgaccccgtttgggcttaccgcccccggactcggatatgcaaccatcctgcagataagcttaatgtatagggaactatacaatgaagcatatgattgcacgtcttgtttacttgcacgcccatttatattccttacaacgaacacgtcacaggatcaaagcgcaaggtttgcaggaaatgcaggctaatgcactaaaactatgcgactaatcttgtaaactcggatgacatgacttggtgaaggaggaaaaagcatgagctagagatatcaaaaaagagagagaacatgaaatgaaaagaaaagaacgtcaaaaaaaagtggggagagaaaagaatacacaaactgaaagaataagataccaagcgccataaaccccatgctgtgcagatcaaaaggtcaagctgctgtgcccattcgtacgaatatcagcgcatcgaactcggctgagcaaatgagactgctcagtctcagttgtcctcccagcttttctcgaccgtctcacgcactcgcttggtgtactctttacggttgtctttgtagaggttcgaggcctcgacgttggccggagacgaggtgttggggtcattcagaagactagaattgacgagccgcacattagaatttgtatagtgatctttcatagacaagccagcgatacctttgaatactagtaagaatagccgccacatcatatgtcggactccagcggttctgcagaatatcgagacagagctcgccggtcccgtacacattaggatggaacatttggcttatgaatttcacacccgggggtttgttggggtattgttcttcaaaattcatgaccaggcggaatgtgccatcttcgaacggtgtatcggcggggccgatgatgacggcattcctagcatttcatcagaatcattgtcaagagcctcaaatcatgccgcggaagacacataccatgtcatgacattatcagcgactggagatgcagagacaccagctgggggatcggtttgcatgcgctgtgagtatggaaatgttagcggggcaaatcatcttggacacagaacaccggggaagaatttaagaagcaaatcgggctcatagggatagctttatatgagattatttatgggtacagtagaaacgtctcgaatagcctaaggcgaggtgacaatattgacgcgtaccttgaagtcccgcatcagacgacgacgggcggatgtagacatgatcgaatcggggggaggcggaaagtaaatgaaatggtttgctaaagctgtgtgtatgtagctagatatcaggatttgcaaatacagtcagaagtgaagggaaagaaaggagaggggaaggagaggaaacccgacaggtcattgatacggtaaggcgatatgcagcgaaccgatagaggggaagtccggatgaactagcccaatggagaaaccaccccaatcaggctagagtgaatttccgagcagtttcccggggccccgggaaactccacggctactccagtgctgactcagcaagaattatgtgacctcgggataatttccttaacaaaaacttttaactagcgctttcccaaggttccaaggttcacctaacccgaccgcctcggaagaagcctcggttcaagcggagtggcggttgtaggcggttataagggcggataattttcaatacatatgcagatgcaacagcattcctcagttcttcgtccttaatcatcccttctcacaatctgatttctcaatactgtgacctcacccactcaccccctcatcttaaaacaaagtcatgatttccgcaggcatgtctgctcgtctccccaaacgggtcttccccgcattttgcccccagcgacagttcagctctgcacgcccgacatgcaaggagattcaggaagcttacattctgagtgcatctcgaacaccaacgacaaaggtgggtacctttagagaaatctcctctagaagaacaattcgctaactcccaaggtagttcaatggttcttttgcatccgtatcagcacctgagcttggcgctgttgcaataaaatccgccctagccaagtccaaggtacctattgagaagatcacggatgtgtatatgggaaatgttttgcagggctcagtaggccaggcacctgcccgtcaggcgtctatatttgccggtctcccttccactgttgaagccacaacaatcaacaaggtctgcgcttctggcttgaaggctgtgtcacttgccgcacaaaatattcaacttggcttggcagaggcacaagtggctggtggtatggagaacatgagtcgcgtcccctattatatggcacgtgccagccaattgccaccctttggtgagatcaagctagaggatggtctcatcaaggatggtttatgggatgtttacaacaatttccacatgggtatctgcgcagaacatactgcgaagaaccacagcgtctcgcgggaggagcaggatttatatgccatccagtcatacgagcgcgctcagcaggcatggaaggagaacaagttcgccgacgagattgccgcggttactgtgaagggcaagaaaggagataccattgtcgaccgggatgagggcttcgaaaacttgcgtatcgacaagttgaagggcctgaaacccgcctttctacgagatgggagtggtactgtaaccgctggcaacgcatctagcatgaatgacggagcatccgctctgatcttgggcaacagggatattgctcgcaagtatggcggtggcagccgtgtcttggcccgtattgtttcttcggccgatgctgccgttgaccctgtagacttcccagtggccccttccaaagcagttcccctggcgctggagcgtgctggaatcaccaaggaccaagtggcggtatgggaattcaacgaggcttttgcggctgtcatcaaagccaatgaaaaggtcagtgccgtatttgtctaacttccataccagatctaatttctagctcctatagattctcggtttgcagaacgccaaagtcaacatgcttggaggcgccatctctctcggccaccctcttggcagctcaggctcacgtatcctcgtcaccttgctccaccaattgcagcccggcgagtatggagtggctgcgatctgcaacggcggcggtgctgcaactgcgatggttgtgcagagattggatcgggtggattgatttcaccaacaatgcaatgtcttcggtggcaagttatgactgatgccctcaaacgaacaatgcagacttggatatcatcccgtgtagcagagacgtgcacttttcttggatttggaatagcggattggccgaaaattgtatttactcaccttttatgtataaactcatcgcctgtttctttgcggacctttttatatggatacattagtactatgtatcattctcgagctattttttcttcatccctttccttagatctcttatatatatccataaagccattaatctatctttcgctcccgttttgcaactttgaagtgatctttggaggattcttagggtcttttgtggttggtgcctgattcctcaggaatcaacccagcagaatgcaacccaaacaaaagcagactctggcttttcttcttcatatcctcatgctctacctcgcgaacactttatataccaataatgctgacacggcaaggatccgacatctgacactatgctgaaccctgtgaccctgtcattatctccgtcttgccatgacgccatttcttggtccccggacggtgagcttgctatcgctgcgggtgaatactttcaaatcctggtatttatctagttatccgatgagcttcaatataattgacattttcatagacaccaaaaactagcagagatgaggactctgcccccaactcaacccaagattggctcataactcgtgttagagccaacttgtttacgaactctgaatggccgaactaccttccgggaaatcgagatgatttctcggtcgctgcagacctttcagaaagcaatgtggtcggtctcgcttggtccccagcaggactaggcaaatatcgacgtagtgtcctagccgtgctgacgtctaatctggtattgtccctctgggagcccattggccttaagaagcaatggaccagggttgccatcaccaatcatgtattttggtcacagctgcagccatcacaggacccaagtagccatgcctttcggaaggttaacattcgatctttcacttggtgcgagtctttgaagccatcaacgcctaccgcgggcgcttcctttttacattcgcacgaaagccgctggggaattccactgctaatggttgtgaacgatttcaatgaagtcatgctagtgcaggttcgcagatcagacccaacgaatagcccttccaagccctatgatcttcagattctggcgtttcactctctaaagaacccggaaaccaaggacagtccgttctgctctggatcgctcttcgagaaggcaatgaaagagagacaacgtactactgtgctttcctgtggtccgtggcagatttcacccgcgacgagcctggggaactttggctgcgcagtcaccatgatagctgcggtatgcggaacgcagcttcggctaatgaaactcaaagtgactctcgggagcgagctcggggagacttcacaacagtacacgttaagcgccgatttgacagagcatcccctggatcaattgaatgagaaatgggcatatcacaacatcgctggccctattagatggctccataccgtacgttcgatttcttacatccatgctaaaatgcgccatttctctaataaaagcctaacagagatcatccacaaccattgtcctggcagtgggcgccatggcagcattcatcgccatatctatgccctacgatacgtacacaggtagcgttagcaattctgatgccttcgtatttcatgactatccaatctacgagccacaaaccgaggacaacaagggccatcaagcaaggcacctggagccaatttcgggtatgttatttaaagacctatgaggccctttcagcacttctgaccagctatagcaatgctcacttccgtgaatgaacaaagcgacacatgcaagctctacttaggtacactcggtggaattggcttagtcacagaacttcgccaactacaaagcaacagcgctctgcaacaaccaaaatggaaacgcatgattgaagagtttcaggatgactatgacttagagcacgacttgggaggaatgtcagtttccaggatttggggactcgcagcctatcgcaacatgactgcggctatcttcacttcacatcccacggacatgatcgagtatcgcatcacctctgacgacaggtctatggttgtcttttcagaagagagtggacccacgatcaatacccaagccctatttgcggcgcaaatccccgatgatcataaccagacaggagaagtgatacgtttcgtgctacctggtgaggacggcaatattgaacccgacatggagagtcaacgcctgctttatgccgtagcttgtcgttccattgtgggtgaagaggacaagtcgcttcggcttcatactcggcggtctctagagcgtctagcagtagtaacaggcgcggacctgagcgatgagatttccaaatgcaacagcaaccccgtcccggtatctgcgaagactatggatcaggtcactggcccaggcggccacatttatgagaagtgcgaagtttgtaatgcgggaattgggtggccctcagcccagttggctcagtgcgccaatggccatctttggggtaagtcacctcatggtttgaatttgatagtaacgtgctgacagttttcattcatatagaacgatgtggattgtccttccttgccattcaaggacctgggatatccaagtattgttttgtctgtcgcaaagaagctctcgatgaagaactcgtggcatgcatgtgtggaggaaagcaaggtcgaacattcgatgctctctttgagacgtttgatatctgcttacactgcgcagccaaattccaggccagttactaggtgtcctcagatagaatctgcaataataacagtgtctccttgatggctagcggctgcaaaaaaagacaagatatgtgatgtgatattgccacacaatgcttccaacggataatcatattcatatcatttacagagagctatctatgtgagcccaaaaagggaccccgcaataggatcccattcgtcgtcccatcggcgagagctttctttttgggcacctagacgaagactttccaatttgtcgttctcaccgaacaggtcgaccaagtgctcagctagctcctctgagcttccaaagcctaacccattcacgccctcagtgaccagctcgggccatgcttcgaaacgatcccacccaacaacaggaagaccagccccgaacatatctacaaccttcatgggcagatctaccccactgctgctggtatgcagactaactcctagagatgcggatgccaatagccgagcatattctggtacactcagccacgcagttcgaattgtgactttctgtaacttgctggacttttcaagggccgcaatctgttccaaatacatctccttttgtgggccctttcctgttatgatagccaaaatctcggggaggtgaggctgcactgtgatggccagttccgaataccggaggagggcatcgatgaggaccgagaaatcttcatccgcagtccatgacgttgaactgactagaacacggagagaccctgctttcaaatatgagtgaaattctttcgtttccggtagagtcgtgaggaaatccattcgtgcattgggatcgaggataggattgaagtgactggcagggcggtcgtgcagtggcaggacaggagctggaaggttgaaatccttcttgagaacggatgccatggcattggtgacgcaaaagtgggccgaagcagacttgcaaaataccttctcataccatatcgacattttcaccaatggatgggttgggccgagttttaacgcaagtatggaatatccaaaattatgccaatcaatgacgagccttgtttgccgcaggaaacacacaagggaggctatagccagtgtaggaatggaaggcgggttcttttattcaagagggagtcagtacttcaaatgaagactgaggaacctccctttcagacatacctgaaccaaaagccattgggacggttttgtggtgtatgcgagacacttccagagacaggcgatctggaatagtaccttcaagggcccgtaaattgtaaacagcagcttgttactggtctgtaggagagcgggatgcgggcgaagcggaacaatcgaaatgttggggttagatatgatatcaggatgaggatcagattctgtttcataaacggtggttagcgatcctatcttacgttctgtatcaaggggtttgtactaaccattatacccaataattaccacctccccgccatgcttcgcaatgctcaatgcatgatactgcatgcgcgggcttcggccaatgtcaccaagaacaagtatttgaacacatgtcttgcgcctttttgcgtcatcggatcttggagaccctgcttgttctggttgatattgcgaaggaagtaacagaatcaacacagtgagggcgctagacaggccgaacactatgctgatgaaggtctcgatcatgatggcaatggcacttcaagtatttcgctcatagtattgatcagccctcaatgacatcaatgatccttagagagccaaccagcagagggaatatccacagttcgatgcttaggaagtgctcgcggctccggtgtcccgaggtcaatcatccattccgatacgtaatctgataaggattcacgtgattccccttatgagaacctttggggagacgggcctttccttagagatagtggcaatttgtttgggcctgtacgtggcgctcactttccccaattatattactttccttttattaccctccggtcctattccgcaatgctggatctgctgacaacctgcccgctaatctgagctctcgcccgctccaccctcgatatcttggcagtgccccatctcctatccttttcgttggaccttccagctgctgcgcaccgtcagcatctgaagatcatgtcgacgggggcaccgtctctgggcgtggatttcacaccacccaatggacacagtcataatcatagtcatggtcgcagtcgtggccatcgatccaaccgctgggcgcaacctccgccttccctctcacagccagctgatgccacctttcctgaacaaccggagtcaatcaatgctatgaattcgacttattcatatggggatacacatcaaatatcagcccacagtcaccatgcgcattcgcattcgcactcgcactccagtggacaccacaatcataaccatagtgtgtcatctcttcaccacgatgtgctagatgaccaccatttgaaagatcccaatggcggttatggaatattatctacggataccactatacaggcagactatagtccagggaatatgtacgtggggttagaatgttattgacgagtaaaagctgaccctaattgcagcaacgagattctgactagtgcactcatcgtgctgccgtgggttacgctttcttggtaccagagacaaaatgcccaaagccaaaatctatctagcgaaggtatacctggtacaactgcgagcattactaccgggcaagttagtcagaagacctgccttttgacagcgctcaccctcaccctcttcggctgtggtcaaatactacgtatcaactaccaaaaggctggctcgtccacgctcttgtccgttaatttccccaaactaaatgtgaagaacgtccaaacttcacttttacaaattgtctcagtggcactgccaatatttgcagcgctcaaggtcggaagttttttggttgcatttgcgctgcttcttgcgacggcatcgagggtcccagcaatcatcaatagagcttcgcacactcaagagaaatacggtcgaaagatcctatccattaccctgttagtggtggttattatatcgagtttccttgggctgaaccatccttgggacgtatctccagtcattggatatgccgccctattaggatctgtgtttattgcgcctcccccattcccctctctccgtcatcatagacctattcctgagcctggtcttgttgctgcacagagcaagacttcacgtctgagtcactcctccgctgtggtcacgactgatgcaccactggccgttatatctgggtcctcccttgcactcctgagcatacttctcaaccgaggacttgttttcagcatctgggaactggtatatctccttattccgacgggtatatttgctacttctcttatgattttcctgccctccagcccccgctctcccaaaaaggccggactcgccatttgcgccggagctgcagcttttctttgttccccacatgtccaggatgacttgctcatggtttatgccacacgtggtgtcttggctacggcttctttctttgcctctcgaagggatgacattcatttgcatctggatacgcatgcgcatagccacacgcacattcattcacattcacacacaacatcagaatcctcccgagtatcaaagtggcttcttcataaaagcgaaccatacccgttgctgcacagcattctcaaagagaaggattcccgtagcatcttctacttcatgtggtgagttatgaaatccaataattgtctgtcctgaattactgctaacattttcagcctgaatttcacttttatgcttgttcaattatcatatgggttcctaactggatcattgggactgcttagtgacagtattcacatgtttttcgattgtcttgcgcttgttgttggtttatgtgccgctgtcatgagcaaatggcccccgaacgctcgattcccatacggctatggtaaagttgatactttgtcaggatttgccaacgggattttcctcatgtgagtgttgccaaagcggtgcgtagaggcaaattctaacaacatacaggatcatcagcgttgagatcatttacgaagcggtggaacggctctcatcggggagtgaggtgcatcgtctaggcgagttactgatcgtcagcattgctggccttgcagtcaacttggtcggaatctttagcttcgagcacggtcatgctcacgggcatgatcatggccacgaccattctcatggcaatgagaacatgcacggcatcttcttgcacattcttgccgatacgcttggttcggtggcagtcgtcatttcaaccattctcgtgcattactccggttgggccggctacgacccgttggcatcatgcttcatcgccatattgatcttcgcctccgctgttcctctagttagcagcacggctaagacgctgctactcactatgccagccgacaccgaatatactcttagggaaacactagcgggagttagcactttgagaggcgtggttagttatacagtgcccaaattctggcttgatgatacaggaccggtatcttccgggcatagccattcccatgaccattccgagcatggggactgtgagaatcaccatgatcatagccacagccaacaccatggtcatgagcagcaccacgatcatgaccacgatcatgcccatgaccatgaccatgaccacgatcacgatcacgaacatgcgcatgagaagaagccccagaatattttcggtgtgatccacgtcgtcgcttcccggggtgcagatttagaagacgtacgtcaacggaccgtcgacttccttcgagagaaaaacatggatactcttgtccaggttgagcgtgacggagatgcgcgctgctggtgtaacggtgggagtaagggcttttgattggtgacaatgtttcaaccatcatcaactgttctcaaagggaagccagggtttacggtacatttaatatcgctttgccccggccgatgtctatatatctcttgtacagataggattggatcggttcgccgaaagattacaccgatcaacagcacatagttttctccgcagcatcggaagtgcaaggcatatacttcaatgattcaataacgaaccccagttcttcatcgcatcacatgtaggcgaaacctatcccggaatccttcaagggtgaaacttgtacgacccgtctatcagttatagactgtcctgaatggatatccttgatctgagccctacatttctcagacaaatggagtgcagctccgtcggtgcccctgaggccagatctccgtgaattgcgacacgatgctccttcgggtcacacaattacattgaacctcggcagcacatggcgcgaaagtccagatctacgtattgtgttattctgacaagagcgaacctccgtttcatctcctcgaggttgccagccttgtcaactaaatcggcaccaccggccaacctgccgggccgcggctccagaaaaataacctgtagcatctgaaccgtacaaatggaagagtgacatcgagtcttgtgctaccaaccactcgacttctaggtttggacagaggatgttacgacattctatataccttccgacaccatcgcaaccccagccgatcctttctgtcattcttctacagagcctactacagagatatcaactacactctacatttgactctttcgtccagtatattcaatgtcatcagcttcagcttcgaccgcaaaatcaccgtatgccgacgaagtcgtgcgaggaggatatgcaaaaatatttgagggccatacagtcttcctcaccggaggtactggctgcctagggggttgtctcctctacaagctagctctgcaactgccaactcgcaagattttcgttctggtaagggggaactcccagcgggctattggaaaactgagggaatcgataccaaatcatgcacaggctattttagccacgaacaaagtcgagtttgtgattggagatatgaagacggtgaactttgggattgaagctactatccttcagcaacttcaagatcaagtgaccctggtcattcatacagcagccaagatcaaacttgaaggtcccattcgtgatgcactggagaacaattgtctccctgcgctggaaatggcacggattgcctctagattccggcgactgaaactcctcatccagatctctacgtcatacgtcaatagtcatcgtccggatggcacggttttagagcggatatatcaattgggaggcaaagaagatgcagaggaagaactggcatccatattgacgctgggcacatcacctcacgcgggcaaattctcatctacctacacccaagccaagcatctcatggaacgtctactactcagccgcttccctcttcttccaattctactgctacggccaacaatcttcggtcctgcgctcagatacccttactcgctatatggaccggaggactccacgcctctcaacaagtttactaggctttggttctctgatcgaggcgccacgcaagtttggcatgccacggaaggctataaaacaggcgccaatatcctagacgagattcccgtggacctcgtagcaaacgcatgtctattgcacgcagcagcacggactacgggcattgtccagattggttcccagctctatcatccgattaccttcgatgagatcttccgaatgggcctggaaaatgccacgcctgcagcccagcgagagtttccgaagatcatatttaccgaagatcgcagcacaccgcaatgctttcttgcggaattgattcaagtaggaactcgcaactggttattcgattgcgggcggtcctactggctcaaacaggtgagcgggccattgagcatgcaggtttgcaagcatgaggcagatgctctgaatttgacacggactcacgatgtcctcggggctctaaaggagaaagctcggatctgaactgagctgcagggaaattggaggctgcaaatcggctataagatactttgtagcccccgtaatcttcgagctatatgagacaaatatgaccttcgtatactccacgctacgtctatcataatacttcctcgattgatatttatctaggtcattttagagaaaggcttcctcaattaaaggtagcttcggtttaaataagccgagttcattatccactgtagtgggggattccagtataggataacccagcggccatatgatctaaaagcatccctgaaagatagcaacgcagacaccttccacttctcttcttggtagtcaccccacggtgttctcctctctagcaccctaatattcccactgacgactctgctctcacgcctgtttcgtaggcagggtcccctcttcacaacccagtaaacttgctgtttcggatgactagaaatacgttgattgagtgggccagccaacctgttaaggatcatagtacacagcaatagaacagaagctattaatatttatctatcgggtttcttcacattgggtttcctcgtgtgaattacaaaaagcgggtatagtatatcaaagtcccatttttttccgggcccaagccatagcattagcccattccatatccccgggatgcagtgcatccaataattcggagaccaatgcccggcccgagtctcgagcccaccaatgctggccatcaagctccccgagcaacacaccccagtgcatgagaatcaacagagatagaggctgtcggcgtcgcacattgtccacgaattccttgtcgctcatagcgagccaagccagaacattggcagcatcaacagaattgccaactctggctgagaaatgccgcagatagacaatagcatctttgttgacctgatgctgatcggggtcgatactagcgagggcctcatcgttcaaagaaccgagtcgctccagggcatcccgcatatcgctatctatactggctaccccactattccaatagtttcttcgacgggtaaacagctctaatttaatccaagattcaccaatccggtggatttttctcacgccttgcaagagttcaaatacaacgacaatattctccgttatgcttgaactttccccgcgggcagcagtcactcttggtagagcgatgcctataacggtggtgataatggactgcgccagcgcagcctcgcagttcattgggttgatactgtcaacagctgcgcgatatggcgcaaatgtgagattgtgatattggagggcgatatcaatgtacaccagcgatgccggtggctcgattgtggcggcaatatgaagagcccccagagccagaatgccgttcattaaaaaatcatactgaagagccaggcgaggaatggcaatctgccagacgtaatgctccgagctggaagagcaaagactcttataggtttctgtggaaaacttatgcataagctccagatctcgcaccgctgaaatggttgaagaaacgggagctgtcagcctagggatcctcggccgcaggggagtgtctataatagccaacggggccggggtctggcttgctcgtgaatcgggccgagccggcgctcttaaatatgtgcatgggagttcccgtgagatacaattggagcacggtggccccttttcgtcacactgcattcgttagtctcgtcatttgatggagcccgggacaatctatggggccatcccaagtttccggaactcaccttgacgcgacgtctcttgcactgatcgcagccttggcgagatttagtgtgcgctcggcgaggaggcatctcggaaaccacggtacctgagggtccatgtaaccggttcgctcggatccttcgagacgtggaagagtccaagcgcgggagagaagatgatgatgtggaggagtcacgtggaccgagactataaaaagacttccctgccttgttttctctcttctgtatggtttaatcttttttacagtttctaccttctacttcttcgtccgggtgtcagattatgcttatttgataatacttttcaaaacgccgtggtcgcttcgtcctctatttcagcattagccttacacagtcacatgtcccaatatagccctaggacggacttgaaagtatgaactcaataccgactgacattatctagattctacagattctacagattctagaaagaaatgtccatctcggaccaaaatctctcggaccaaaagcaacaaatccccgaaaggatcaaagcgccttatagaaaacaagtggatccggcgtaagcgacgtggagagaacgagaacgagaacgagaacgaacgagaacgagggcaagaaacagccaatagcgatgcatttggagccggtttcatcgtgttgaaccaatttagggctccacctgctggaggtgttgttgctgcggccccttgatattgagttgacctgcctgaaggctgataaatttatgatttgatatccaacccctccagggattttctccattgagagactcgaggcccttttccttgttatcccaccttctaggacttactctcactcagctctcttttactctccttcctttactctatatttctttccttttgattacacatctcactcaacatggcgggctatgacacttgtttcgaagtaagcccacaatgtcctgttgaactcacgacatacggttactaccccaatctcggcggaaacatcttcttcacggtcgtttttggcctactcggaatatgccaaaccggtctcagcatctactaccgaacatggacattcttgatagctctgctcattggaacatttatggaaatggctgggtacattggcagggttcaaatgcattataatccatggtcggcacctgcattcaaactccagatcgtgtgtctggtgctcgcgccgaccttcgtcgcagcgggtgtctacctaacgctgaagcatatcattctgaccttgggacctgaacactcgatcttgaagccgcgccttttcacctggatcttcatcggatgcgatattggctctcttcttttacaagctgcaggaggtggtgtcgccgcagctgctggtaacgatgacttccaaatgctcaaggcaggcgacaacattatcatcgctggtatcgccttccaggtcgggaccatggttgtatgtggattctttgctactgtcttcttctggagggtcttcaaacacggtgatgggtttgcgggcgagaagaacctcgatgcaccgattatttccaagtggctgccgttcgtcgtgggcgccgaggtctttgcctatgtcacagtcttgattcggtgcatttatcggtaagagccaatatgcgtacaaacaagacactttactgaccccgatatctagtatcccggagatggctggtggctggggaaacccgctgatgcagaaggagaatgagttccttctcttggacggaatgtaagtggtctcttggttcttttgaaagctggggaaatcatagctgacgtgtcattaggatgattactctcgcctgtctggccttcaccgtcttccatcctggaaagttcctcccatcattgcgcttcacgtccaagacccgcacataatagcattcttttatatttcttttgagggtgctctcggcgttttttagatactttctttccagcatgtgcctatgtcagagatgatatactctacttaatcagggtgtaatgaaaacataagaatcagttgtcgctctacatttgtgctagatttacgtcagattcggaaattatttcggaaatagattcgatccaaaccagacaagtacgctaaataaagctccagcctcacgaaatcgcaaagaaatgcaccacaaagtgaccagcgatcgagagcatggcaaattattgctcgctctatgcaataaagaagagaaaagaagagaacaccgctcgccgcggtacattgaagaagaagaaccccggcaactccatgttaaatcagacataacccgccatcttaaattgccgtgtataattaaatcgtgtctagtcgtccaacgtcagacggacgcaccgtcggacacgcttcttaaactccgcagggtcctcacgccatagccgagcagcctccacattcgccgggctctcgtcgttcgggctggaaagcatagagatgacggacaaaaggatcgtctcgggtgtttgcacgggagaccagcgttccgcagccgactcatagccgtatttgtcctcctcgggcgggtggagaatggaaatgcagacgtcgccactctcataaactattaaatcggagtaaattgtgagtaagttgtctgtgataaataattcaaccggaaccacatactattcggatggaagataggagattcgaacttcatctttggcggccggtgagggtattctgttgggaaagagagacgagccctgaaaaaaccacctaggcaagcaaacttgtgagtattcttcaatgcatttgtagcaacatatccctagacggcattatgtttgccacagcaccagtcgaggaattgacgtcaaatccatagagaaatgaggccatcacatacctccatacagcttcacatcgtctgatatcatgagcataacttcccattcgaaaacgttattatcgaccaagccacaactgatgccgggaatatccttatcggactgcatctgctgcagttggcgggacagcatgcgcccggcgggagaagtcgccatgctgatagtcgaggaagataaagcagaagagtggaagggtgaaattgggtcgatatctgaaatcgggttcaatgtcaaaagaaagacaaagagtaggagatgaggagacggtgaggggcgcaaaaagaaatgtaggcggtaaggctaaagcggggtttgatagcctagatggggaggcggtagacaccatgggcacgtaattagttgctactttgtatgtctaggtagccctggaggtatagactcgatgaggaccttagggttgtcgttatgtttaaatctcgtagtgcatgaggaaggtgaaagactattgtatgaggcaaacatttcaatctctcccaatgatatagatgtagcaaacgcaacaattacacacacatcccagcatttcatcatgtaccaaacatcggatctcaatggctttttactttcagctcatttagagtccaggggcacccatatcgatgggtttggcagtcttggaaatccaaaagatctgaccaccaagtaccagaagagcgaaaaaaccaagtgccacctccatggcaaatgtcttgccaataaccttggcgaagcggatacgggcagcccagtcaaaggtagtccatgcatccatgaggccgatcttgccgctgccaccggtgatggccggacggactttgcccccgaaagagcgatcaaatggcacaatagtctcatcctcctcgggaagcatggaggcagccacacggacaaagatgacacgagcgggcatagatatcaagaatgccaaaagagcaggaaccacactgacgcccatgaagcggtagatggccacaataggcgggacttcctgataaccggaaacatcgagccagccagcaagattggcaatggccatggggatgaagaaagcagcagcggtgaggacatcctggagagcagcggctggggcaatcttgatccaggtcttgtagctggggatacgctggtagaagcgctttggagagggctcagagataacaatgtgcacccaggccatctgccaagtagccagtaccacgctcaggacggattgaacgacaaactggcccaaatatgaattggtaggcacagggacaaaacctgacaggaacccacgggccatagtgtaggccacaaacatgctcattccacggaagcgagaccagaagccagcgcgggagcggaggtgcttcacagtggtgcgcagcttgctggtgataggcttgaggggagtaggagcgagcagctccggatcattctcgtcggttggcttggtgggatcgggactgggaataatgcgtacgtagatatcggggttggtatcttccactacagccagagtggagaccaccattccataggtatactcgatctgtcgagtgttagttccacaaggtgatatctggaaagatttttttacttacagaccagaaaacaagcccaatcaaaatagcagtgatagcaaacagagccaccaagcctccattcggctcctgcttctcaggcttagactgcatgtgagtgacagcaagctcggtgccccgacgcatcaggacgttagtgacggacatgatgaagccgacactggtgaatatatatataatatattcgatggaaaagagatggaaacacgaggttggaagtgcaaagatgagaggggaagacgggggcttttatctgatacaaagccaggcagcagaccactagcgccggagtcgtcggtacccttagagtacttagagttctgacggactccacctataattttaggtacctggcgtgtaccctgatcagcctcacgaggaactcggacactttcttggacatttccatttccctcgaacaacttttgttctctctatgggatggccatgtatctactattttgtactacttcttactgccttggactatttgcttcaaaattcacccaatcatccgatgatataaatagaaacccctgggatcatcggcgtccaattcctccgtgccgaccaaacattgccaggttgcctccgatcaccattggcccccgacatgttagcgctaaatccagggtgcctaggcgaagccggctcggccaattctccccatcgagagtgaaaaaaataaatgaaaataccgcttgagcctcaattgtctcaggcaaagtgtatatggctagaatttgccagcttgtatacattctagatccaatgtggcatgcccaactcccagaaatcaccagaaagtgactttctataaatatcggatatcaaccaaagatctaaaacgaaccccaacatgaccagaaagatgcgaaccaatcaaagccaactcatggtcgcagacaaccatccgtggatgggagacaaaacgctgaaaaaagagatcaatcatggtatgtacacaacaagaattctccaactttagtcaaataacttcttcatgcccttgtgtgccagctcaacgccgaggaaagtggcggcattggcaggcaccgcacgggcgagagcaggtccgaatccagggaagaaggccttcaaaccgccgctagcgtaaaccgagcggataacaccacccatggtaggcttgcccggtgcgctctgcaggcgggacttgatggtgtcaacggggaagacagggatccacatagcgataccggcggcaccaccagcgcacacaacggcagatagggagagctcgcccgtcacgttgccttcggcatccttgggggtcaaggagcgcttgatgtactcgtaggccgcgaagtaggcggccgagccgggaccatcacgggccaacgtcatggcgctaccacggaacacgctgcgaacaccaccttccttgtacagctggcgcacgacatccagaccaccggagtactgaggtttctcgcccggagccagttgcttctggccctggatctggaggaggaccttgacacgctcgaagggtgccgtgatcagggtcatggggatggcggagaagaagcctgcagaagagatttgtgcgatggagtactgcggggtgtcgttcttgactgggacggtagagaacttgctcacgagagtcttgcccacgtcgtaaccctaatttgttgttagtatcgcttccggacgggcgctcgcagctgcgggcgcagagaaaaagaaaaaaagacgaacccaaaagctgacggcaactgtgagacaggactgattagctcataactcgatcaatttcagatgtgagagccattatggcgcatgctagagtacttacacatgggagtaactccaacaagcggcgcagagacaccggcatacaatccctaggaaccattgtcagttcggtcgcaaagtattcaatgtgcttgtggtgatcatactcgagccaatccttcacgggctaccgtcttccggaccacatccatggcacctgagtaaactcccttttcggccgtctgcaggcgcaccttgactagatcaaacgggtgtccaacgacgacagcgcagagaccaccaacggcaccggctgcgagagagcgcagctgtacaattgtctggttgaccgccttggtctcgatgtcgttgatctcattctcaagctgctgcgcggtgggggaggtagaggaagacattgtgggcgagtcggagcggggagagacagggatggagatagggatggaggatgaggggagaagagggtgaagacagcaggggccaagagtaagatgggaaagtaattgatagcgcaataagaaaaaattgaccggggatcttcaaatgatggagacggagacacaaccgaagccgactggccttccccggacgaaggtgtgcctcggttcggcagcggaaaaaccgactccccgtggtagatactagcaagtaagaaggaagtctacagtactgttgaactaaatattatggagacatttggcatgttttgctgggtttcctataagaattgaattagaatatactcctacggcgtcagtggccccgagtgcgccagtccgggtgaacgggagagctcaaccactccacgttttccccgcggaataaaggatggctgtgtcaggattaggtttgctccatctctagcttttctcaaagggtataggtgcaggggagatgtgaagtgcctgtatcgttgcaaatgtgtacatgtacggagtaagtacttggaagtccgagttctactccgtagggtcgcaatcacatggaaatccacgtgctttatcaggacgagaattagtatttatacatccatacatccatacgtctatgcattcagatgcataaggaaaaaaaaggattcaaactgaaacacctcatattcagctactcctttaccccggaacttgctgtagaatgcaaggctgcggtttgcgccagtggcgaatccttctatctcagtcttggtacccacttggcgttccaaagaagagggtttgatttcttcaacccttccgtacggagtacttaattagtgtcaactcgcaagaagtacagagtataaatgcataatacagttttcattcattaagctcgattgacattatattaacagctccgtagagcaaagagagacaaacatgatggtacccatcaagaacccgttccatattgtacctatacaagcccgacgacggcaacacatgaatcataacccataaagtaacatggagtacatgcggactctacgcattcacatgtgggacgtttacagagcgaggatagcgaccaggccgaggacgcccatagcaccactgccgacagtggccatgggggcagcggcaccggagctggatgtaggagcagcagagccggaatccgagccagaggtagactcagagctgccggaatcggagtcggaggtagactcagagctgtcggagccgccagtggaggtggaagaggtgctggtgctaaccttggtcaccatggagccggaggcgtcggtgctctagagatatggtcagtgtggttttcaagaagaagatcaagtgtatcttacagtgatggtggaaacggagccagtgttggaggcagaggcctcagtgccagtcaatgtagcggtggtcttggagccagaggcatcagtgctagtcacggtagcggtggtcgcggagccagagacgtcagtgccaatcacggtgctggtaatcgcagaaccagaggcatcagtgctggtcacgacagcgacgccagtggttgtggagccagaggcatcagtgccggtcacagtagcaccggagccagaggtttcagtgccaatcacagtctcggtggtcgcggaacctgaggcatcagtgccggtcacgacagcgacgccggtggtcgtagagccagaggcatcagtgccggtcacggtagcatcggagccagaggttccagtgccaatcacggtctcggtggtcatggagccagaggcatcagtgcgggtcacgacagcgacgccagtggttgtggagccagaggcatcagtgccggtcacggtagcaccagagccagtagaagtggagtcaccaccagcaccggaggtagatccagaggtagagctagagtcagagccggaggtagagctggagtcagagccggaggtagagctagagtcagagctggagctggaggtggagtcagatcccgcgacaccgcctgcgatataatgttagtttaccatatcaagtgttcgaactactaatagtcacgtaccagggcacttagcgacggccatagcgagaaccgtctcggcgtcgtcgttggggcaggcctccttggtgcagtcacggataccgtacttgtagttatcgctcttgcacaggcaagcgaggtcaccggacttgcaacccaactcggaggccaggttgctcatgttgttgagacacatagtctagagtcgataaggattagcattgagtatgattcaacacgggattaatcgaacttacagcacactccgaggcagcagactcggcggcgaccatgccaaaagcggccatcaaggccagagcaacgggggagaaggacttcatgattaagaattaggggaggaattgaggattctcgaggtcaatgtgtaagggacgaggaattggcaaaagtggaaattgaaagaaatctgcagatggggaccttttataaagacaggcctgagaaacaaaaacaaagtctgcatcaacctcaccagccacctgccccagactataaattgagtctccatatttgacaaaagaggaataaagtggacggagcaaacggtaaagcccaatcaccatagcggtgtggattgcctggcaaggccaagttgggattgttctgcgacccaacgtggcgatgagagaatgaatcgattgcttaagcgatatgaagtcatcacaacatccgaatcctggatttgccctctgtagtggcctgaaatggggtgatcgccccggggatagctcacacctcttctccatcgtcgatctcataggtccatctaatttgccaggggccccgttcggaattgaattttggcttttggcttttccacgatgttctccattattggagccagccctcccattttgccgataggggaatccgtttggctggcatcattaggggtaaccaagattttgatggtggttgagcttccaagctttctttcctctctgtgttcaccgatttgagcaatgtttatggtcaagataggcgaagatcgacgggtcccaatcggagctgaggccggcactaaactggattgtcgaatagtcagagacaccccgatcgcactattgaaaatttgaaaactcagttgttgggacaccgctattttgtggctgaaccttgggacacagccacactatcaatatcaccatgccatggactcgacgctattccggactctaggctctacggacttattacggactactattatgtattccccgatcctgaattgtagacggaggtcggactataaactacccccgttctgtatacacagggttgattcccaagcttgtttcagctttcaagggatacccctggaaagaaactggcagctttgagatacgtaagaattgaattgaaatcatttgactcgcatcgtctccttcctttttttcttcaaactagtaaaatattccgcagatcggaatcaaacatccaccttggatgcgagatactacggactccacatgaagataatgcatggagatttacggagtatgtgctccgtacagaccttatatagagtacggaataataaattaaattgattaagctaggtacatagcactatccgtacaataataatatcaattgccactttactttgacacatccctaacccccaaggtttataccaggtttgacggcgtccggtgttatgaccatgtgctaatcttctatttcctgattgcactgttgacatttgaatatagtctagggctacgcgccaagcaagctgatatctagcaagtgcggctgtgcggagaactccgtacagcatgttcccgctattgtatgagcccacatcgactgaagctcccattcgtgcagacgtcaacatcgtgggaacctgcatagattcaccttggcaaatttgagacaccgctatctctgactttgtatgccccaaggctgctatcgctaactctcacaatgctgaggttcagtatctctactctactccgtactccgtactctagctatagttaggattgactggtaaagtccaacattgttagtaatattgacgttacatcgagtccaacgctacggagtactgcctggcttatctggacttccccgcttcgaaatcctccaacttctaaccttctaaacctccgcgacctagagagttccagttatcttaaaactcggctcggttcattaaaatggttctcagaagttcaaattcgccattgacctccgagttcgatgccttggtacagcagcagatggacaaatggaaagtccccggactctccatggctgtcgttcatggctccagcacctggtcaaaagtatgaagacatagtgcactttattattgcagaccactaaaccacttttaggcgtatggattcgccgagtttcctgatcgcaagatgaccaccgattctctcttctctacttgtagcaccactaaggcattcaccgcagcggccatgtctctcgccatcgacgatagaaaggataccaaattcccccttcgctgggataccccaatttcgtccatactgagagatgattttgtgctggagaacgactataacacaatgcatactaccatagaagatgccttatcgcaccgctcagggctttcgactcacgacgcttgtttaaatttagtgcatccccagagatccctgcgcgaagctgttcgcaacttgcgacatcttcctatagcctatgcgccccgcactaccttttcctacaacaataacatgtatatggtggtatcccatgcattggaacaaattgaaggccgaactctcggcgagactctcaagaaacgtatttgggatccattaggaatgaacgacacatacttctccgtcacggatgtctcgaaggacccatctcttcgtcctcgactcgtacgaggctacacctgggacccagacaccaacacctacatcgcagaaccatacatgaacgacgtcgctgtgactggagccggcgccatggtgagcagcgtactcgaatacaccaagtggctgcgcgcgatgatttaccaagagggtcccatctcctcacagggccacgcagaactcctgaagccacgtacggtgatcacaaattgggatgagatcgtcgcacctcctgcggtcccatgccatctctatgccttgggatggtttgtgagtagttaccgcggtgagccgttctactggcacagcgggagctggcccggattcggcatcatggtgggcttcctaccgagcaagggctttggctttgctatgatgggtaatacgacgaatgcccgaaatgcgcaggtggagatctacatgcaccttctagatcagatttccggaggatcgcggatcccacacccagtggcagtgggccaggcgacagaactgggaaataggacgctcaaagccaagtccgagtgtgtggacgaagccatcaaacggctttacccgtctctgcctgatcctgtcattccccattctttacagttgaaccaatatacggggacatacgagcatcctgcgtgcagttctatcactctatccgtgcgaaatgggtgtttggttgcagatctacttgaccgtgctattccttcccttatcactctcgtccatgcaagcggggagttctttgtggcgcatcactaccagcctaggacaattggatctctctccggttactacgctacggaattcatagtgggttctaatggaattgctatggcgatgggcctggatgtggagccagctttgaatggagagaagatgtggtttgatcgcgagtactgattctcagttatataaatcggcattgtatatatatttgatatccgtcgccatccgcttgaattgataattgaaaaactcaccccctctgtcaaattagacctacatacatacagatgtagttgctactccgtatgtaaatcgaagcttattaccaaacccatgacactgactggatgccaggatacgaaaaatacagatgcctagcggcccgaaatggccattcggcgatgccgaaccggctcgggctcggtcaagtggagtctcaaaaatttcatctggcagaccagacgagcaaaaagttactgaccgacgcagggatcgaacctgcaatctcttgattcgtagtcaagcgccttgccattgggccagccggccatatgataatttggctaaaatgtgcgctatagggtgcggctcggtcaaggatgatttgaaatttgaaattaggtaccttttgtatggtatactcatacaaagggtactttattataaagttcaagggttgttaagtatatcaaacaaaaggtacctaattttgtaatttatcgttcagtgaagatggcgccaacacacggtatgtgttggggcgcttggcacgatcatcggagagattggatatatactcatttccaggcgtgtgtaatagagtcatatatacacatcagtaacgggatatacataaggaccaagaacagtagggtatgtaaatgcaagaaaacgccgtgaagaagccaaaataagatgccggttagaccgagtcattcgactctgactcggcagtgtccgccacgtaaacatgcagcaacatggaggccttttccgaaaccgtgccttcttcttctgagacaatccgggatcggtagcctagtaccctctgccatccaaggcacacccccaatgaggccagcagctgtccgatgaagaacccaaccaaacaagccaccaacccggcgacgacacctagcaaagcaggaacgacgatgggacggatgatgcgcataaaggagttcttgtgatggcggtagtgaggatgacggtgttcagcgtggcggtggaggttagcgggagtggcccagaacgaaaagaaatgagtctccggtgccgagcgggtttcattctcattgctgctaacctggatagcatcgggttgagcgggagattccatcgggggtgccgccgtggtttccgcggtcttgggcttatcgaagacggagccgaattgtgtcctccagtaattgatcacccagggctggctcttctcgtatagatgaccatcttgatcgctgccacgggctggttcgacacggatgcgggtcatctcgtacttgtcactttggtaagcaaggaggtcgacggctacagcgtcaggtgacaccaggttgttctgcagatcgaaccactcgactcgcacacggatcatgtccgcgatggatgccatgtcgttgttctggagtggctcgacgtcgagcgtgtaggacaattccacggtattgtcactagggtcgatttggtctgcgctgccatagaggggcgcattgagctgcattatcactgatgggggatagagttggtggtcattggcatataggcttccattctgaatgctcaaatttatagactgtatcatattaggattgaattaattgggtcaaaacagaaatatttatcacgcacgagtcttgatctgacgcaattttcgaggtcgtcggtggagggagcgaaagggagtcggagttgatgagaactggggacggcagaggcgagggcactgcccagagagagcattacccaaagcagctgcataatgagcagtgtaggatattgaagtaaataaagtcaatgacgtgcgatagagggaggggagaagaagagaaagaaagaaaaagagagacagcaaggcttataatgtacggagtaaacccttcgtactaaggttcggtccaatacaccttataaagaggaaaagcttagcgttggtctcagactattcttagtgtgtgtgtctcaactcgggaaatgccaatgtctcatccttcgcaagtgtaaccctagcacgctcacattaatatgtattacaacatcgatttgaacagctcgttcaattctctgctgcctaggaactatcgtgtactccaatggtatccacccaggccaatcccaccgaaccgacaccttgcccggatttaatttatcgtacggggtccgcggagagcgaactctgttcgacagatcgacggattcaagacagaatagttagttgcgggatcccaatgtagtaagtgatcgagtgatcgagtgctcaagaaatggccgacacagtcagcgtgtctgatgtcagattgaagaggcattcaccattggaccctgtgaatccaccttgttggcctgggagaaaaatgacattgaagaccatgaatcttggcgaactaagaaactgcaattaatacgagtacaaggagataccgacttgtatgatttctgtgtgttcgttggttcgtttgtcctgacttaccaatggatatcccacgtgggtggaggaatctcagattaattatctcgaattacctccaactctcgcaattctacacttccatttccaccaattgaaccggcttatttacacatcctatgtacagcatccatcgtgtctatattgcatcacacactcaggtcgcctggtaataaggcgcagtctgccagaaccggcagcgtgggttgttggtcaggtcccgcgtcgcctggatgctattattgccaatgttcatgagctgtgcatactggccatgctttcggaacaccggtgccagatgagacttgggcacgccatgctggacaaagctggtgaaataatcctgcatagccaacgccacggtcgcgttggtgactcccaggagcgaagagctggtcttattgtcgtagaacgtgtatgagacatcctgtccgtgcagcgcgggcgggatgctgaactcatacgcataggtctgattgtagaacgcgcggttgatataatcggtattgcactggaagatgaggtcggagatgacgagcgccgtgcgcgcgaccgagtcggtgtacccataagacccgttatagaccggtgggtagaggacattatagacaaagtcggacacgtttttgggagtgttcggtgacaaggtcttcatttgagtggccagaccggtgctcttgacgctgtccggcgaagtaaaggccaacccctcgtctgcgttatggccgaccatgatattcaagttggggtcgaaatcgcctcggagcaaaagctgccccggcagagcaggaacgaagctgccgtccacaacgggaccgtaggtgaactgtccccactgggacttggtcgcgacctggtacgcattggccgcgatcaatttggccgaaggcaatttccgggcttgctcaaccgtgctgacattgagaattcctaggaactgttgcagcgtggcttcttgctcctcttcgccaatgactgggacccagcctgggctctgcatgatcgcttgttggaagggtgcagcgccgcgggtgcctccatacgcggtgatctgatgaaggattgatcctgcgccggcagactctcccataactgtgactcgggttgcatctccaccgaacaggtgaatgttcttatacacccagtcaagagcaaatcgttgatcgtgcagcgctgcattggccgtgccattggctgtgatactgtcaccaccaagccagccaaatgcacccaactaagaaattagtattttcacgacagcgacggaaaatgtgtcgttgacttactcgataattcaaggcaacataaacaaccccatcattgtttccctgctgacttcgctggatcaatccggtggggtcggagctgctcttttctccccccacatagcctccaccatagatccacaccagcaccggcgccaagttctttcggaatgctgcggcttcacctttgctgcgttcgaagatcttcttaggcacaatcacatcgaggaataaacagtcctcagtagtgcgtgggtcttgcttcgccggtttgtactcgtaggaagagatgttggtggatagagggaaggatgtattatagaagtagctcaagaggaaggcttcttcggcagttgtcgaccacaacggggctgcctggggacagatctttcccacagagccattctgaatgtgatctctgttttgtttgggaagtacaggcgcctggaatcgcaactcgccaaccgggggtgcggcataacggatgttgctgaagttgtagaggccatgggagttctacttatgtcaggggtaatcaagatcaagctaaagaagagtcaactaacattgaatgagattgcttggtgcagctcatatcccagatcaactacagggagcttggaggccagacaagccgaagccagcgtcaacaacaacacagcgaccatattgacccctgcagagcagaacaaaaacacagggaaaagaggaccactggagcttccaggtttatattaatactagccagaaatcccgaatttatcccggtacaaagtaatctatgttgtatttcatccctacgtccgagtggagaactccgtacggagtatatgattgtccaacagagaacgagatcgacctcgtcatcgcagcttagtcagaggggaaatcggtcctttctatccgattaatatgggcgatgatgtcaaagcgagacattgcttctaacacaccaataagagatgagatcacactgcgctaaatccgggctgagctgcgccatccaggaaattgttggcaccgacttgcggggtactccgggaactacaacataaaaacgcctcgtcagatggagcacgcgatcaattgcctagaacggtgttcatttgttctacggtgaatcatcgacctcgcgaaccttatactcgaacatctggttagagggcacttcatgctcgttctggagtttcgcggcactctcggcgcccgcggctggcacacggtattcgaatcgtttcccacatgctggcacagatccgtcgggcagtgcatatggaaaaggcagatattcgggtaacagacccagttgcacaagtactgttgcctggtcccatgaaatgtgctcatgaaacaagcgatctccgcggatgttgactacagatgtgaatggaacgcggacatattttcccgtaggagggatcccggggattctaggcagatgtcaattaattgctcagctgagccacaggaaccaatcacccacatccagtccatctgcttcacatgagtgaacacaaagataaattcgtccacaattcggtccgtgcctactgtccgactaataagctccaaagctgtgtcgtcggggttgttaaagatgaaatgattgagataaaaatggcttaaacgagctcgtccaatgcctcctgtcagcgttggcacatgattcacgtaaggctctgagaccatcgtcgccattgtcttttcgaccgagcgtgcttcgaattcataataggtgtgctcgtcccagatcttctcgaggtcaaagaacgggccacccgtgtgttttttgacaaatccgacaacccgcgtatgagctactcctgctgtcgatatgttgaaatccggatggcctgggatcatgaagctaggagagcatacatcggagtatatgtgtatagtctgtccttccttcttctcgacttccattggaccagatagctggaaaatggttgactgaaagaagggaatgtgccaagagtcgaagaataccgcggcgatcagagccgtgccttgaaccagtgcaccttggagactttcctcgaattgaggagcataatctttctttgatccataaactggtttgtgtcagtggaggctagtgaaagggccgggttgacacttcgtacctatcaacccaaccttttccttcgtatcacactcgggcctctctgctaagccacactcagcttcttgaagaagctcccgcagagatgatatgttaatagcagacttttcgtccacagtaatctgtgccactgtaaagctttcctccgcccattttttgaggggttctggatcaagcgtcttgttctgctgctggcatgtcgcgtaacaaagaggtcgtatgagaaccagtcctggaccgtgtccacagcgggaaagaggaggatgaatggtcacatatggactcaagtccactggagcggaagataaacttgactcggtcatttcgcactcagaagttggaagttgagcaaatgggggtctccaagtggccggccgatcgttatatgtaccggcctgtcacccccactagtgaggataaggatacaaatcagctatgcaagagatacgctctcaatacgcttgatcggtcagatactcatcatgtaattttgcaatcatcgcatttatctcagagctactatccacgtgacctgtcatcctcggcccgttcatttctacgcgcaagctgtcgctctcccaagagcacaacccaacaatgaacgcacttgttcagtctgcgctgactgatgttgaatctaaactcaatgttcttctgaccagccttacaacctctcccactgctgcaggagcccccgcagcagctatcgccctgctcgatgcggacgatgcgctaacctgcaccattgaaacgcttcgacagcaccaagaaaaccacgcgaagatccttcgactgcgaaacgaggcacaacaattggaggaccgagtcaagggtatcgtgggggatattgaaagcttcgagaaagagatccggactgcttgtggagacaacggcgacagcgacagcgatttcgattccgacgacgacgacgaccttggcggaaagaaatcattactacggggaatcaaggagattgactacaggttactcttggatttcgcacgtcgcatcagcaaatacaaccacgaagcagcagccgatgcagcaacaggcgttgtgaaacgtcaggaacaaggaaatactcccgccgacaaagatgtgacaatgacgggaacaaatggagaacaaccaacagaggaggacgcagagccagtggcatctgtcactaaaaacgcaacgcagtggttggacgagtccgccaatgttacgcgccaggtctacatgctgccctacccgatggaggaacggatacggatgggattaatgggtcaaatccagctttctgctggtgacgatcccgaaaaggaggtggaacggttattgcgcgaagctgaaggtcttggggctgcagaacccccggcacctgtggaacccgccgaaagcacaaagcaggcgggcgaggctgcgaaggctgcagctcaggccggatcatcagctactggaatgccgcgggcgcatgccccagcaccagcaccgaaaccaaagcccaaggcgatgctggaccttgatctctacgaccccgacgaagatgacgattgagtgttttaaagcgggcgttgcattcgattttcataatgataccagctaaacagcaaaaagccattcaaactttttatttttattttttttagccgtgtctcattccacattttgtctgcctcggggcgtttgatccagcttacgagccgaagacttggccgtccatcccccggaatctcttattgcgcagcgaagcgaagcaattaaatcataaactcgtgtagttgttacgtggcggttgtttccccttcgaggacagtctgcaaggtgcactagttcataccataatgagtaactagcactcgtattgaaaagagagtgccaagaaaagatcttacctaattaggttagaccactgtgccaacagtaaaatcgcttcagttctccgattctaaattgatctcactctacaatctattcccatttttgatttcccttgacccaattagacgacaaaagatactcccacaagatataaaaaattagtagtactagtttagttcctacatctacaaggccgaggaaaagaacctgccctggtcaatcgaaagtagtaaaccatggagaaaatttgatgttgaatatcagatcttttcttattttcatagtcgtccatgattactgttgagcaaggcattcaagttgatcggttatcccgtgaaagaagcacactggcactactgtaatatgaattatctatctccatctctctgaagataggagactcgcaatacgagtaaggctacaacggttttgacgatgaatttaacgtgattcccgagtgcaagctacaagttctctgatattatactagaggatcatggtctccttcaatgtacgtcacactttgtggctcatatgcactggtcattcagtattcataaaaaatcttccagatcccaaatgagtttagtagtgtgggtgccatggctttggtatctatattagtcctcggcggtggataggcaagtttattctgaactcaaagggtcctctactcttttcaaagtataagactagaatagttccttccaacaagagattctctgttctctttaccagaccagattttctaagaactgttttattatctccgacaatgtctaaattacctaacaatagtcctccgcaatacgaatcacaccatcaaagccaagataatatacttatcactgtcattcagaatgaaagatgcttccgggaatgggcgcgaaaattgcgggatcttgatcctagattcgagaagttcttcgatagctcatttcaaggcgacttgagatgcccaaaatgtttggagtatgtacttcaagggggccgactacttgatgaaatgacagacttattcagagaggctacgaacatactccaggaaagaacatcacacggccagaatgagctctatgatgccataaaaaagctttctgataccgagcttgatcgcgtctttgcttcttcaaagttgggcacaacatcgcataggcaacctaagctgacttggaaccacaaaaacaatatagacggccatgggaacttcaaatacaagtcatcgagggcacggatgtttttccacgctatccagggggtatgggaacatctcaagggcccgctagtctgagactcttgggatcgacagcttcctgcgagtcgcttttgtttctctaggatggtcctgacggggcattataaagaggagaaaatagcatattggtgtttgcttctgtgatatgttttatgtttctttataccaataccaaacctttacactttggtatatatttcaccgtattctacaatagcgagaaagaggtttgacgttgttcattacccttgctgaattgctagtaatataatccatcggatatgaagtagttgcaatcttgactaagtccttgatatcttactaggcaccgtatatgctacttatcatgccacaaatgtaaatgactacaagactcacctttcatgtaaatacagaacctaccttcgagataagaaacgtttacagcgaacggtgagatctacggattagcacgagaagaaaagccacgcaagcacacatagcaaggatgcgatatataatgaaataagaatacagaagaaaaaaaaaaaaacaaggagcaaaataagaatacaagaaaaactaaagatacaaacaaagtacacaaaaaaactttgtttgtcacatatcctgttttcccttcatctcacctcgctggggttctcggggagaagcaaaactggtgaaacgcccagaggaacgccttggtgccagaggggctcgctcccacccgaattagcgcttgacccagcgttcaaggccccgggcagcacggccagattgctggacggtggtaacagtggcctaggcttcggcggccagggggcgagacagagaagggcccaacggagtgggcctgcagaatttgctatcacaatagctttcatgtcagtaccaatactatctccgcccggactatctcccgccaacgcctgcgctggtgatcagttcgagcttatcgagtgacgaagccttctccaaaaaatctgagaagggcgattgcaggagagcctcatgacgatcctgagaagaaggcctattcatgttcgcagtcgcgatctttggtgtaaggatgaagtgggagatattatgacataagagcgcgggcggaggggatcactagttaactaggctagttagttggttactcgagcagtttctcaagtggttgctcaagtagttactaaagtagttgacgataaagcagttaatattcatatgacaaaagggacttgattttatcagtggtttacatacaaattataggtacctactgccatactactaccatatggcaggaaatatgcctaattgtgaacgcggtactgaaattacaggcagggggagaataagccagtaagagggggcctttgcgtagcattaaaagttggaatcagtcgcttcgctctgcaacgacaatctagagaccttgggccgtcaagattactagtaattagtcgatatgccactgtctatcccgtcggaggattagacctgttaattccagaggacaagttttgtgtcactggtggctccaccgcagaatatactttggcaggcagggttgcctcttcagtctatagtttgacaaataaccgcttttcagtatctaaggtggcttcgtgagccattagaattcaggctaaggacagaacagggctaggaattgctgataattattgatataaaatcaagcatgcaaggtagttcatgtgcaaggcgattttgatagtgaatagccactctattttctaaaatttacctttgccttatatactatcagaaaggcatatcatctcaataactcgctcgcatggctcagtggtagagcgcgtcactcgtagattcaatctggaaatgatgagatccccggttcaatcccgggtgtgagcatatttatttatttttttcgtcttcttcggacaatttgctttataaagccaaatgtgcaggagtttttcactaattagctcgcatggcttagtggtaaagcgcatgactagtactaagtctatcatgagatcctcggttcgactccgagtgtgagcattttttgcctttatttaatctccatctttacatcaaggattgcttcatataagcaaagttttaaaaggttttcattaatcagctcgcatggcttagtggtaaagcgcatgactagtatgaaaagctatcatgagatcctcggttcgactccgagtgtgagcattttttttgcctttgtttgagctttttgactgagtgttttgcggtttcgtgtgagctgctttcaacctttttgagttgtgctttccattatggtagtaggcttatatagacaaaggtgtgtaagttttccaccaatcagctcgcatggcttagtggtaaagcgcatgactagtatgaaaagctatcatgagatcctcggttcgactccgagtgtgagcattttttttgcctttgtttgagctttttgactgagtgttttgcggtttcgtgtgagctgctttcaacctttttgagttgtgctttccattatggtagtaggcttatatagacaaaggtgtgtaagttttccaccaatcagctcgcatggcttagtggtaaagcgcatgactagtatgaaaagctatcatgagatcctcggttcgactccgagtgtgagcattttttgctttttttttataaactccctagtggttgagaattgcggccagcggtggacatacctaaagtagctacagagtagcgagtgtcgatagaatgtgcccgtggtgccgtcctgctctcctcaccgcccttttgtcaaattcgcatgtacctaagcaagacggcaggtacctgcgctttgtatgtaaatcactgacaaatataagtcactattatcacctcttattctatctcaccaacgtcaactgaaaagagataggaatcaggcagatttcgcaatttgttactcaatttgttactacataaccaactaataaggcagaaaataataatacccgatcgcgaaggcgatactttaaatttagcgcttgccacggttaccgcgttatcaaacttatcacagtaggtacatgtacgaagacgtttttagcagtttctgaaacttgttctcctttttaagttaataactcttaatacttataattggtctaacttttccgagtcgaagtttaccatatgtatccgtcataagtgaatccctatcaaaaggttcttttgtatttccaggcttttaacaagaatggagttatataaacatatacacaaatatggaaaaggcttccaccaatcagctcgcatggcttagtggtaaagcgcatgactagtacgaagtctatcatgagatcctcggttcgactccgagtgtgagcatttttttttaactttttggcttgcgcagccttgaagcttttaaacacaaagtcagagagcaagagacgcatttacagcaggcgaacattactgggctatcgaatgtcgagagcggagattgatggatggatggccttaagaaaagaaaatccagtcaaacaggaccaataaaaggacagtcagggctaaatccgtgaaatagaactatacacaggcagagtgcatgacctagccagttctcctgcaacaagtgagcctagaggcgtaaatatgcatggtgacgaaactaatcgggacgcataagacagaccccggggctatgagtgtcttgtatttggggtgcattgaagtcccaggcttgagcactcgcgctctcaaccgccttctgtaggtggaccatgtgactatctatatgtagtagtgttttgagactatagatgcgtagctgaggccaccctgttactacaaactttctacctctctccacaaatctttatcccggcttcgccatcaaacttgtcccgttgttacacttattaggaatatgtagtagtaccgcaccggaggatgctccggaccagttcacctattatctctttcgcttcaaaaggctcaacttggacccaaacatgtctgcgtatgtcggattataattgcggcctgtcggctgggcccttatccttaatcccccacagtgtggaggaagaaatcgatgagcccaatgatgttcgatcgagtcatgatccccggatgtcacctccacaccacgaaacacgcgaacaaagcttggtcgagccagactgtgatagtcacccggaccaatcggaaacaacgatgctttacctatagagtcgatgtaatggaatcttggcacttatctggacaaccccaaaaagcatttaattaggctccggggtcccggtttatgcctggtgtccagaatggcggttctggtcattttgggttctattctgctcagagctcttgaattgcttttttcagatacatcactacaatgagtcactacgaacacccttccttcgatcaagatcagccagatggagatgtggagaagcaggatgacagtgatggagtctgttctgctgggggcactcgtaaggccagccgagcgcaagggagtgcaggtggacgggttagtggagatgaaagagatgagttaaaagaatgggagtgctacgacaagctagggtattccttttcctggtggaaaaaatggactatcatctccgtcatctttgctgtccaaacgtccatgaacttcaatgccagtttctatgccagcagcatcagtctgtacgcgacacacttcaatatctcagagcaggccgcacgtgttggtcagatgggatttctcgttgcttatgcatttggttgcgagttttgggcgcccttcagcgaagagtttggtcgatggccaataatgcagctcagcttgttcttcgtcaatatctggcagatcccctgcgctctggcccctaatttcggcactattgttatctgccgcattctcgggggtctatcctctgccggtggttctgtaactctcgggatggtagcagatatgtgggagccaggtgaccaacaatatgccgtggccttcattgtgctatcatccgtgacaggctcggtcattgccccagtcgtcggaggctttgtggcaaccttccttgactggcattggaatttctggatccagctgatccttggaggcttcgtgcagatattgcacttcttcgttccagagaccaggtgcagcatcctcgtcaccagagaggctaggcgaagacggaaagatggggatatggtatggagtggtgacgagctgaagcaaactcgtatgtccttccgctgggtcttcatggtttgggtccgcccatttattatgttcgcgcgggagcctatcgtcttgttcctctctctcctcagcggtttcagcgattctctcatcttcactttcctccaatcgtatacgccggtatacaagcaatggcacttcaatacgattacaactggacttgctttcctcccgtgagtacccacaaccttgaatttagactaattctgataatctgatcatacagacttttggtgggctatctcattgcctatgtttcattcattccatggatttatcgggattgtaagaaacgagagagagacccagatgctcttcagccagaagctcgtctttattggttgctatatggtacgtattctcaaatctggttcattggtctcatcactcactcgtaacagtggctcctctgttgacaattggtctatttggatttgcgtggactagtctcggtccacctcatgtccattggattgcgcctatgatcttctcagccttgatagccattgctaatgtaagtcatgaaaactcttaccccacgatacaagactgacaagttattctgtgatcaagtatgctatttacatggccacaattgactacatgattgcctcgtatggtccatatgctgcctcagccacgggagggaatggaatggcgcgtgatttcctggctggtattgcagcgatgtattcagtgcccagtaagtgaccataattcctacaacggaatatccactgaccacaaatacagtgtatacaaacatgggtacaacgcatcaccttgaatggccttctactttcttgggcttcatggcaattctcttcaccattccaatatacgtgttctattgggaaggtcctaggattcgagatatgtcaccattcgcgcagaccttggcttctgacagaaagaaggctggccgcagggtttcttcttgtggttccggtgatccagatcccgttgaaaggtatctgtctgaacggtcatcacaagcgaccagaaccagatccggttgaaaggtatctgacatgttcctcgaaataattctatgtctctagcttgctgtggtttgggctgagatttgcatcagaacggcggaaagaaagagtatgaaatcactgacacaggatataattggtttcattgatttctatcttaaaagcttctctttggtgacatttttcgtgctgatcttcgtttctgttgcgttggccttcatcactgcactgctaaactgggaaatatttttgtattatttttgttttgatataatgttacaatggactttattctgggatatacttgctgtcgcacacttacgcttgatgcaagaatgccatcatcccatcatgccctagagtaggggcgattaagtatgtcaccagggcataaatttctcattggatataagccagcgtaattagtatggtatccttagtatattactgcacttcaaaattactacctggcaacattaactagtgagagggttatggcttatgactgcccaatggcatatagtcgcccgtactagagtcatgtcatagctaattcggaaataattcccgatgcagcaccagcagcgatatttactttgtccacaagggtgtttgaaattaaatatagggtatagacgtttagatacagtacagttgatggctcgcaatgtagaaacggaaatcaagtaaaatcattgattccaagaatcctggagttttcgaatggcatattcagtagtccaacccaaatcagcttcgacgccccgtagcagatcaacaataatctgatgttcctcgggattttcaagacactgcccgacagcgacgagaagcgggaccatgaatatgcgaactccaccctgggggcgacccaatgcaatgccgctgacttcacgggcacggaattcgacctctttcgtgacctcccggtacccttgtaagcggtcaaaggctgtggacggtgcactgatcacatctgccggacgattgagcaataatgcgatgcgcccgaaatggtaatgttgcatggcaacagcacaggttgtcaagccatggaatatttcagggaacgacaagtaactcccttcggcagtctttgataaatccttggggcgttcgatccgcacagaagaacggaacgtttctggcacattttcaaaccatgtttgaaattcgaaagatattttgagccaggtatctgtgtccggatacggcagttgggtggcgtttgttgttgtgccttcgggtgaggctgccggcggagatcctgtccactgcgcaagctgtaattgtttagacctggcgaggaagttgatgactttcgtgacaagccagattaacccgttagcagcctgatcttcctgcgatagagttgacccgttccggataatatggaaggatttctggtcgttgattgaaattcctgctgcccgccagaggggcaggttctctgggtcgaaatgtgtaggtgagcgggtaaaataagaaccgagatagtcttggcgggcgaaattccagaaggcagcccgaataccatgagaaaacagggcggatgatgccgaatgtaaactgagaagtgactcaaacaaagggccaatgcgagcaagttgcctggggtctaatgttagtaatagaacagcaactgctaacaagcatctcttacatgtgccattcgtccccgggcatatctaaaagcctatacatggtaagaagcgtagcagacgccaacagctcctctgtctttcgaatgatcgccatgtcgtttggatcttcactcgcgggcttcatggtcgcttgagtctgacgggagctgatccatcgaccaacgatctcaaagggggattccaagatggctgagctagacacagtggtatagccatcggacgtgaggttattcagatccgaagctcctaggtaatagtaattggcagctttgaggaaccagtcaacttgagttgcgtttggataagtttctgtagtcgcagggctcgtgaacattccacccgtggaagccttgacccctttcaagcgagctaggtgtttggctgctagcgctgcaatagcgtacttcacggacagattgctgatggctcgaataggaacatgaacggtaaagaatttttgagaatcggacaaatctagcctattgtattatcaatacgctgcacacgccaagggaaatgtcagtaatacgaaccatggacctatgacctccgagtaatgtcgagtgaggaacgcgatctcgtgttcagttccagtcatgagctccgagaaaatatcctggaattcatctttttcacttcgatgtgatgagctttcggagatgaccctttggtaatcggggcccttatgtggaattggggtgtaggtgttatcaaatgttgggaaacctcctgcggccgcagttggtgagattgacttatatattgtgtttcttgaagattcgctgccttcctcgatgccagagatggagttgtgaatagagatagctgggctttctggggcatgcattgttgtttgctggatactccccatagcaacctctgggcggttagaaggaccaggcatttctactatcatggagtcatctctcgagtccatctgaaaatgaagagccggattatcttgctcctgaggttggttccattgcaaggtctgctcattaggtcctacttgtgagctttttggctgtgtcgggtctgatatcagctctgcggggacgtatcacaaagcatgagtgcttaggcagttggcagtttgacctactttgtttgaattgaatgcagagtttggccttgaatgaggctcctgatatggagcatagcggcgccttactgtggctccctgatcgatgaatttgcgggtctgaacataccccgggcattctacccccgcggtggtgcaccgctgacaatgagggcgagtctcatcacactgccccaagttagcgaaaatctgcacatccaagttcaagaagtcgaactaactttgagatgcctctttttgcaacgctcgcatgccttgttagatggcaccccaggcattgtgggttgcgtgccagtatcgcgatttccagggcttaatgctcagttttcgaggtcatgggagaagctctgcgttgcgtcgttataacacatacagctacttcacatttcgaaaatacatcaggcgaggacgcaatcccagggcaacaaatctagaatgaatgatgcaaggtgcggccaaggcccgcgggctgaaggggggatgacataatatcccgggaatttctcgcttggaactcggaatttggcgacctttttcccttgtacatcctgtcgtcacttgcttcttttctacaaaaaaatcatacaccatgttgcgaacaccgtcaattctcgttgatagacaatatgacacatcttccccattgatccggtatattgaaggccacgatcggatacgttggggctcaatatcttcaacacagccggttctttcaggaccagaacaaatccgcgtatatcgcgaatggattggtgtgtcaccatatcaaattgactagtgaatctggtaactaattctgcagatgctgggagacctcataatatagtatgttgggagtgccgtctccccgacagtctgattggttgccagacctgctgtaggtcctaccatacagcatgtttaatggatgtggttcgctctgcaaataacttccattgtccatcttgccgggcaagagcttgggatcgtacaccacctcagttccccgtgccatctccaaccccaagcactggagggaccccaaacagccattcagacacgtcatctgtaaacatttcaattcgtcgcgatagatcgccaacagcatcacggggtaaatcctcaacggcctcggggatgatgcatccccctactttgaaccgtattgatgaagtcaatgctcgcggtacgccaactgaggtatatcctattgcagagatgtaccctcggcttctggaatatctagcgttaccagatgctgagacagatcgccatgcccaatcgtcacagttcaagcatcaactgggaatggctatgaaagaaattgaatcatatcgggcatcgatgcgagacaagacgaacatccgagaggactattcacgattacagcgcgagaatgcacaaatcaaagcgtatcttgattccagggactcaccgcgagagtctagtattcccagcccttcgacagttccacacagcatcatctcaaaaccggtgtctgaacaaagggtgaaggcttgggacagccttgctattgacatgttttgactgttcgtgtctggctgcacgaagcattttgacgtatactcaacgaggaagttgaagtagtgatgaagagttacaactgcagcaaaagaacaagcattgaatgtcctgaaccctcgattcacccaacacgatcactttcaatggtctcgatatttgccgaacatcttttttcgacgttctagatgcatgttggaaaccgtgcatttcgccgaaaagttcccgaccggtcgtaatttgatcatgtcaccgtcacgctctccatttttgatataatggcgcggagaaggttacatgaagtgaaattgctctcgaaatggacgaatcaacctctggagagactgcgttccccgcatctcggggcaattggcgtcccctcaacctcaacgatcgacaagtcaggaacccggtcattgtggaactcggtcattatcaagtttcttattggatttttcaaccgtcttctctccgtatcttcgggttttcgctccttgacctcttcccaggcggggaatgagcgtggcagggtgtattctgggaccagatacggcagatgtgacaccatttcggtcgagcgtcgatgcaacatccactggggaattgctcccgcatttcattttggcctaagtgcaaggaaccaaggaggtgactggcagtttcctaatttttcctcatttccctcgaagggtacttcgcatgccgatctggcccggaatgcttcccccgcgacttattgccaattcctataaggagcttgaattccgtggaacgcgtcttttctacgtctgaattgtaacctggacagcttttggattattcttgtgtatggctgtagatagtctctggatccattatgctatcacagcatcactccctccacatgtgcatcttcaatggcatcgtaacagccctatatgcatccaacgtgatcgccgcaaagcattcttcggatgactttgacgtcttgaaatatgtcgatcctttgattggcaccgcgaatggaggtttgtcttgaatatgacgagcatttttgtcagcaaaggctgacaattcttacaggccatgtatttgcgggtgcgactttgccatttggtaattcatacgataccctttgttttcatttaacatggctaacaaacgcaggtatggccaaagcggtggcggacactgcaggcgagaatcaagctggttttgcttacgatacggaggttgtgaccggattctcacacatgcatgattctgggactggtggtgtaagttttttgtagactctcggagaatatgccctgtatctgactgatttcacagtccccgtcaatgggaaatttccccatcttcgctcaaggaaattgcccgcatgacgatattaaccagtgcaaatggcaaaaatcggacagagcagctgtctgggacaaagagtctcctgaagttcgtccaggatacttcagcatatcattggcgaatggggtccatgcggaaatgacagccacaaatcgatctgctctatatcggttcacgttcaatgaaacctccagccagtcgctcagtccagtgattcttctggatttgatggatttacctcaatctcgaacaagtggaagtgccgacgtggacagatcgactgggcgtctcacgggaagtggcactttcagcccgagctttggtattggcagttacaagtcatatgtttgcgttgatttcaaaggagcagagcttcgtgatacaggcatctgggagaaaaaccaagcaaacatcagcagtcggtcgctgacactcgggtctgacacatcatccactctctcggctggtacatttgccagattccacgcccccaaagacagcagtattctcgctcgcgttggcgttagcttcataagtgttcaacaggcctgtgagaatgcggagcgagagctacccgactttgacttcgaaggtaccgtttccgctgctgaatctgcttggcgaaagaaattggatgtcgtctccgtggatgcagatggagttttaccagatttacaaacagtcttctggagtggagcataccgagcactcatcagcccgcaagactatactggcgagaaccctctttgggaaagtgacgagccatattatgacagctactattggtgagcaatccccgattcgaaacagatgactagcatgctaatgatacgcccagtatatgggattctttccgcagcattcatccactgctgaccctggttgatcctttctcacaatcccttatgatacgcagcttgatcgatacctatagacatgaagggtatctgcctgattgtcgcatgtcgctttgcaagggattcacacagggcgggtccaacgcagatgtggttatggcagatgcgtatcttaaaaaggttccaggcattgactgggacactgcatatgaagctgttgtcaaggatgcagaggtagagccccaaaattgggatgtggaaggccgcggtggcttgcggagttggaaaaatctcggctatattccttttgatgactatgaccctgatggcgaaggtacgcacacgcggagtatatcacggacggtggaatatgcctacaacgacttttgcattgccgagatggcacagggcatgggccaccagtccgactatgagaaatatacgaaacggtctggaaactgggtccacatgttcaaacccgaccaaaagtcaagcatcaagggggttgataccaacttcaccggattcctacaacctcgatacacgaacggcacatggcgctaccaggacccgatcttgtgtagtcctctcttagacttcaccggatgttacctcaatcccgatggccatgagacttatgaaggtagtgcgtggatgtataccttgtgggtgctcacttgtattttatacttcttgaactcgaaactaacgctttacttacagctatgccccccacgacatgggcgctcttatcaagacacttggcggtgccgaatccttcacctctcgactaagctatctccatgactctggtttgctctacgtgggagatgaacaagccttcctacccgtatatcaattccactactcgggacggccaggtctctcggcaaagcagagccatttctacattccatcccaattcaacacaacagtcaatggtatcgccggtaacgacgatagcggagctatgggatcatttgttgtcctgagcatgatgggcatctggccagtgccgggtcaggacgtttacctgatcactccgccctatttcaaagaagtcagcattcgaaacgccctcactggaaaggtcgcgactatccgcaacatcaatttcgatcctagttacaagtccatctatatccagagtgccaagtggaatgacaaaccgtggacaaagaattggattacccatgactttttcgctgagggtggtgttcttgaacttgagctgggacccaaggaaagtgaatggggaactcagattcaggatctcccgccgagtttgagcgattatcaatgaatagtcgatctgaggagcaactgtggtgagagagtggcatttcgagattgttggcctctctgataagcaggttacttttatcagtatattttatcagtatattcacgacttgacactatgaactatatctctttttgatgtcttttatactgctttttgaaagattttgatactatcattggaagactgtataaaccatactgcatcttcagcataactagtacttgtaaagtaagagtggatatgaaataatactacctggcaatgttgactaatgagagtcatacttagtcgtcatcgtaattcgctgaacctaaggcaaagtgtatcctccatcaataatgaggtttgcacctgtcatatagctagacgcatctgaagcgcagaacacgtaggcctagataagattgtcaattggtttctagggaactagatttgtggaatcgtacccccttcaactcataagattcggccattctcttggcggggatcaagtctagccacttgtcgcgccattctttggggaaggtgaacagaatttcggtagcgatgtatccaggggagatgcaattgactcggcagtagtcaacccactcgacagacaagcacttggcgagctgaacaactcctgccttagacgcattgtactatgcgaggattagcgacatgaaaaaggagtctttccaatagagaacataccgccgattgcttctgtggaagattgaccagagtcgcgctggcagaggccgtgaatataacatttccatgaccctgtgacttgaagatccggccggcagcttgggcagaatagaaagcaccatcaagattgaccttcatgatctcgtgccattgatcgggggtgtagtcttcggcggcagtgttcgaggcaatcccagagttgacgaccatgatatcaagcttcccgaaatccttcgcgacctgctgcacaaccgcctcgatctcagactggacggcaacattggctttatacgctgctgcgcgtacgttgttagtagatgcaatctcggatgcgactgcatcagcggcatcgaatgtgtaatagatcaaggcgacctttgcactttgttagtttgattgttttgtagcatcaggtactccgtagtgtgacttgcatttgcacccgcttcggccaacgctctcgagacttcaagaccaattccacgggcgcctcctgtaatgaagtgttattcgagagacctttataattgggagctaccgtaccagtcacaactgcgaccttgcccgtgaggtcgaatgccttcataacatgctggtttgggggttgtgcgagaaccattatgtcgtattggctgttgcccgcactcgagataataggataaactcaatcgaagattaacagagaagggaggagctgagtctgaaatgtccctcttaatccccgcatctgttcagctctgacgtgtctccaaccattgtggcttcctcctgcagctaaatccagtctaaccctgttgaaggtaattcctggcgaaagcgactagacgctgatgattggaacgccctgtctcactcgatgtccactgagacttttatttttttcgatgttttcggttgttggttcactttctcgttgttctgatttgaaccgtttgcacagctgggtgacgtggttgggtgagaggcattgagatgtcgattcagtttcttgagtcccttgaacaactgcttgttctctctgttgagctcataagcccagaggagagtgagggcttcgtttgactttgtattttccattgtcgaagatggggctcggagaggtggagaggaagagaaggggagctgaggactaagaaagggaaaaggaacaaagacactagaacttcctagaagaatacaaagccatcgattaattaattattattcttctagtgaatttactgacttcaaataattaggtctctactttatctccatttcatagagtatagcaaaaaaaaagaggtgctagacttcatgtgctttgtatctgatcaaatatcaagaagacaccgaatgctcaaagatgttgttcggtttctctccttaatcactcatcgtgtcacattcgtcctcggaatcgacttcggtctgcttggtctgagccttgcagtcatcatccttgtccttgatcgctcgagtatcgtcatcactcctggtggaagcttccatttcatcaagcttctttctcaggcgatctagtctcattctagcagcatggttcgtgatgccaaagtgtctagcgacggctggggcatcaacctgtaagttgatattgttagaattcatggccagatgttcaagtgaggccgaacaaaagaaaataccaacctgaacacctgagatcttatggcaggcccacaggaacaagagctgctttttcaaatcggaatctctaggttcctttggcttggatgggctttttccagcctttgaggctggggttgatttagttggagccatttgaaagtgtaataaccaggtatgagctctttgagtgtgataagtgaagttgtgggagaatagataatagtagtgaagtcgagaatgaacaaggagaggaagtgagagagagatcgagtaggaacctttatattggcatcaatagcaaacaactaagaaagcatgtctctctcaacttacatggataagtacaaacagaaggaaagtacatttagacactttgatcctctataatatatacattattctatcaaattggggtatatgaccataaaaacagaaaaagtcatttgaaaacgctcaggtgaagaatcaaatgccctttgtctttacagactcgaggttcttgactggatgtagaaagataggaggaaggcagagtcgagggttgttcttctcccactgcacacgattagtatcagaatatgtcaagacaagagcaagaactcacctctttggcaccgtcatagcccaaccaggctctgtatagcttctccgaaaactcggagttgaacataaacgtcgtattgtatataatattatcgtgctggccccagctccagatgctgtcgagcccagcgttgaccttgccaggttctcccgggttgacatgacggttcaactcctcaggatcccatttggcatcatggtaaatcggttgaggaatctggaccgctttcaagccatagtacagagcccaggatataggagacatctcggacgcgagaccaaccccggacttcaccttatccttatgcaacatgccgagaagtcgcgccgagatgcgagacattgctacaacagcggcccagcgtggggtctcttggtcttgagggaaattgaagacacggtcacggaaaggccagtctgtaccaactgggttgaaatgaggcagccaggtgatcagatcggcttcctcacccacaccccagctccctggctcatcttttgggtatggtacaggggggataatagcttgcccttcgatgtcgattccttccgcgggatgagggccccaaacactgctgttgtcatggccaggcatttcctgatccaccttcttcacaaactcttcccaggtgccatgaacagcaggcatatagaagtgagagttgcgctcccacagatacttgcgtggctgctgtttcgcaaactctgttgccttgtgcaaaaggtcgtacatatggccggtataccgcgagtccatctcgaactgccacacgtagtcatactgagggtgtagtcgtgagaagatctgtgtgggctggaaatactgcagtatagctctaatagggtgtcagtaggggcatgtctagctctgaagggccaacacatacacatgaacatcaatcccaggataccagtcattcaacatttcctcgttaaaccataccgccaggctgcgcagttcctgcggcaaatgttttgccttgaatgccttccaggcggcataatcggtctcttcgggcaatttctcgccctggcagtcgatcaggagaataagctcatattctgcacctgagtagagtgacaactccatcagcatggatcgaatgtgatacaagtcattctcggtgtatttcatgccgatccaagagcgcaatataacggctgtccgggggacggtcttgtctgtttcattcaggtcctcgcgaggctgcacatccgaatctaatgatttgtaaagagcgagtatcttcccttcggatggttgcgtgcgatagcgaatactattgcgctgcagacaatcattttgcaaattggcccagtccacctgctcccagtttatttcagcggcctcgttggaaccgaatgtaccattccaattgtgggttcgagtggtcttgccctcgaggaaaccatatgcaccatatcgggagtagcgatcggcgcagagactgttgttcaaattccacgactcatacgatccaaaagtgggagttgggaaatctatttgacgattagttccccgtcggctcttcaaatcttcctcttcgcacctgaagtattccagcgaaacccgctcatcatcatatcttcatctttgcggctcaggagtcgtccttggggcccaatacacggctggtacgatccctttgacgtcgatttccattccgcactatcatagtgtggataggggtcattgattaattgggccgaaattcgagattgagtggcgtaagcgctcgggaacggatcaacgggttgttctgtagggctgatacagatcagaatggaccaagggagacgagaaaagagggatcttcaattactttgatagcttcacacgcaacggaactactagagcttctctggaatagggaacaataaaaaacaccaggcacagggcggcgatagcgaagcagcgccttggagaaccgaaaaacttccgcagcgccacgaagaaatccattagaatgtgcaaaatctacaaagatgcaaaacattaatctgggagccttgcaagttttgtagctcttgagaatcccccagggctagtggcttggctcggcttatgggttctatcgtgtgtgttgggccaatcgtagagagagaccaacgcgtgtagaccgacagactccgagccaagagaataatgagcagtgtaaaggacagtagagatcattcctatgttacattctttggtctcaattcatgcccttcaaggtgtttccataaattaatgaccttaccttgaccggcgtgacatctcggatcccgccggatctgcttatgttgatcttcgtagccctaattttatgtgctcgtactcgtactcgtcttaatagggatagtgatcgctaggcacatccatatgtactcaaatactaaactaacaagatcgataaaaaccatagctccaatatcagcccacttgacatatgaaaaaaaaaaagaaaaacgcatatatcaaacaggcattccaatatgcttacacgtatcgcatctcttccaaaatcatggggtttgatgtcagtcagtcgcagttcgccgaccccatccactgaagaaccccccaccagtgttattgggtggggcattggccaagctgatccgcgactgcgatactccaacaaaggaatggcgggtttcaataatatttaccccctgggaggtcttgagcattctccgcaatgaatcgtacttgccttttacttcctcaagctcttgccgagcaactgcctcggccgtcttggcagtaaccaactccatcagcaacgtctcttcggcggcaggtctgttattctccgtcgacaaaacggtctggagacccaggctgcttgtccgtctgttatatgtggggctttttgtggagctggtgcgggagagcttgaactcgcgcagaccactagtgggagattgagactcgccagactcaatcgcagaatacgttgtgtctagcggcgtttccgatataggagttttgaggatccgcagctcccggttcatacgctcgagccgctgtcgctcccgatacccgtcttgaatccggccccgagcttctcgtaattgctctttgagggacgagttctcctgttcaaaatcgtcgatgcgccgggtgaggttcaagcaacgaccggcttccacctcgtgcatttccttccatcgagcaacatcgtcattgagctggagcttggtctgggtgattgaaatacgcttcggttggacggattcaaaacgtgcttcggctttcgttactaactcggccggttgtgtctcagccgactgttctctaatttgattcaacatctccttggccagggtgtggtcttcctctcgctcttctctctcctgttgcagttcacgtgtgaggttagcttgttggcgttgaagatcgctgagggccatcaggagttcttcaatctgggtatggaggtcgcggtctttgtgatgtgaagacatggtggatttcgcgcgcggtttttgattatcgacgctagctacaggcgctgatagttcggtcgcagcagtacttgcgtccgacgtagtttcaatagagttgagagtggaagtcaggctctgcttggaggtagagcgacgaatgttctgacttgacgggctactattcggactgagtgacttgaccgaattgtgggagtttgatgagccagcccataaccgcccaaggaagccagatgccgttgcctgcatctgcggaaaggagggtccggagggtgagcctttcgattggttatagctggcttcaagcttttggagactttcattcgtcacgagagaggtgagagacacgaagtcattgacgagatcatcagcattgaaggcgtatctgaatatcacgggttagccgagttctttgtttagaagatgtgctttgtgcaatgtccaaaacttacgtgtcccacaagcttcgagataataatagttgcatcacatcctcgaattcgctgcaagccaaaattctcttttcgttgcgttgcatcagagaaagcgcaactcgcatcaaagtctcgcatgcgccttccaaaaagataacatcataaattcggagaagcatagggagcggacaagccaccgcaaagaatgagaggaaccactgcgatacgtagaccggctcaacgtgcagtgcttcgagatgttggaacaggaccggcctgtgccgtgccaaaagattttggaattgataaacatgaaggtgaagacccgaaagatctggaagatagcaacttcgcaggttatagtgatccatgaggctacaatatgttattagtacttctccaagtcatatcatcgcccaaggagacttaccggacaagaacacaaaaggcctccgcatctgtcatgtgcatgagcagggggcccaccacgaatccaagaccttgacagtagccaatcttagtatcgtacagactaaaacatcgcaatacacggccgagcatttgttgaccctcgccgttcgggtcgcgaaacattgcaacattgggaaagctgcgaccaatatcttttccgatcagcccgtcgtacggactgctttcgcccgaaagcctttggaattcattcaatagattaggatcgcgtgcgcccgctaggctaggccacacaactcctcgcaatggcggaggaacacccccttggatcttattcgaggtcaatgtcggcaaacgctgggcagtccggtggtaatcggcaaccagtgcagcccaaaactccaactcggtcattggaggagggggtaactgcgagtatcgcagctctgcccgagcgggatcccgaatgagtcgcttgatatggtgtagtgactcggagcgggactgccgctggtatttgtcatgaggaacctcggatatccccgatttggggttggtcaccaacgcattgttttcttgttcgagtcgagcgaggagcagggctgtggactaaaattaggccaagaatgttagcactcattctagaattccgcgaaaaagcttgtcacacttacttcatcggacccctctccacgcggttcttgttcttctgtcttatccagcttctcccaattcacctcattgtcaaacatttccctagtctttcccgccttatctgcgcttgtggtttcgggagtcggggtggtcctcgctgcgtcccgtaatggcattggcccaaaggaatcctcactctccttctcgagatgagtcatctccactggggttggaggaatttcaagagtgcgccaatccggttgggtgtgctctgaactggactggttatcggacaacgcgacggtgaccattgagtcatggttcggcgcgtaaccaacgctcgaagatgttggctcgaaaccttccattattgtgaatattgtgacgtgattgagaatcgagtatgtgactgggggttgcaggatgtagacgcgttattgttgacaatgttgatatcggacagggttattttaggcgggtttcaactgcattgcggatctcttcacaatttcgagtattcaagaaaacggattctttccagcagaagtgggacctggatatgattctaaacttgtatccagtacaagaagaaaaggctggagaaagaaaaaagggagtcaggagagatcccacctatttcgttagcccccctttacctttcccctcgtgtagtctcggccccgtcgatcatcctcatacaccgactgtttgaccattgaaatagatagattatgggatcttggaggaaacggctacagatattgtgactacgctgtaaattgtatgaatgtagttaagaagggccaattccatcgctcttcacccatcagagttccccgacatcaaccgaaattggtatcggagggatttcgagtccattacggagtattgcatgttccaattatacatacataggactcagatacttgaagtcatctgaatgtctcaagtttagttatttcaactgcatattgcctgcaggtacatagtacagcctctcatatttgaaagaccaaaggccaaaggggtaccgtcattgtacaccgttatatctttgatacataaaaatatccatctgtaatctttcgtagctctgattggttgatatcttaaatatagccgaattgattggtcgcgcccctagcggagattgaaatacaattaccacccctggcttgtccgttcacctcaatattgaggctggccaacgttgttgtacttcggacaccgtatcattaactcattcgtaaatgacttgacacagacttctttctacctatattgtaggtttctgaaccacccctgggcctcacaccatcgactattcccagagatccacagagtgaggtccatgcggtccgcctgtcagacctgggtggtcttccaatccacctttcgaggtttcaaggagtttctcggatatgttttcagagtggcgttaatggctgtctatattcatccagaactccgtacctgtatccactagaaagaatttcgggatgatagaatgacgtgtcatagcatatgactttaaccaactacataactagtgataaagagggatgtgcactgtgggcaatctggtctccctagacaagaccaggggtgatagggtgatagagagaataccaggggttgctctagaataataatggaaggtggaaagtgggaagtgtctgtattgcagtcttacagtgttcgttgtaatttctaaacatccaatcttctccaagcgcccggacaagccgaacagttgatgaaaatgagttcgcgtcgatcggggatagtgtaagcccaatgacactgtgcaacgaggcatgtgcaagcacagaggccaagtcgcgaggtcaaatattggaataatcatgacgttctgcaatacagaactatcagcgattgaactgataagaacagatactacacttgatctaagccagaggcaaagagagctgaagaagaaggaaaagaaaaggaagttctgggggcagggccaccttcttataggtatcctaagggcggtcggtttatgccactattcacaaatgagacaaacaacgacnnnnnnnnnnnnnnnnnnnnnnnnnnnnnnnnnnnnnnnnnnnnnnnnnnnnnnnnnnnnnnnnnnnnnnnnnnnnnnnnnnnnnnnnnnnnnnnnnnnnnnnnnnnnnnnnnnnnnnnnnnnnnnnnnnnnnnnnnnnnnnnnnnnnnacacttgatctaagccagaggcaaagagagctgaagaagaaagaaaagaagaagaagttctgggggcagggccaccttcttataggtatcctaagggcggtcggtttatgccactattcacacatgagacaaacaacgacatatgctcgcttaattgaatatgtaaatggtaacgtgatgatagagataatcaatgttgataaggtagatagctggataccataggcaaggatatctctttgatgtgtgttacttattggtagtgacaggcacacaatgtgtcctcatagtcactttatatcaagtacaacgctatggatatgggaaatttaagcctcacctacctacatcctagagggagaaatagattctagtcagatctgacatttgaaggagtctagttactccatacttgctctggtttcacccacatttagactcaactccgtattggcgctaacttcattgtgacatttgggtaaacgacagggatgtcatgtcagagatactaatcatgcagtctataaatctgtagatagctgtttctatctcatcttctgcgaattggaactgcctgttttccctcgtttgtttgtgaattgcctatttgggtcacatttacaggcggtgaggaagaattatcatccgagtggttacaaactgcccaccgccccctgtcagtcgcgacttccccgggcaaaaaaacaacaggcgcttcccctccgcgttttatctcatttctcctcttttgcctctcgctttaatcatttccgacttgagcatgctggagcttcattgattcgctctttggcattgaaagatagcgtcattcgttcgcttcaactctgaggcctggcttgggctctttccttcccccgtagcgctctatcaccctccatctaatcactcacttctatcatggatgactctatgaacgaagactcggtcttcgatgatgatggaggcagctctgactttgcccctgagcctgcaccggtatgaactttcatcaatatactaacaccagactcaactttaattgctgacattatacgtccccagaaacccaaacccaaggcggcccctaagaaagctgctgccaaacccgccgctaaaaagaccactcagacaacactaaaggtcaagcctgctgcaaaggcagctgccactaagaagaaggttaaggcggacagcgaggacgaagtgtccgatattcaaatgtccgatgcggattctctgctctcccatacccctccaaaggccaggaaaacggccgcgcccaagagagctggctcaaaacctctggccgatgttgaaaatgagtctcacggaggagacactgctgccgacagcgcgagtaagagtgtgaatgcatctgataagtaccagaaagtaagtcccctacagcttctaacatggtataattttggccgaatacttatatcaattcttaaacgcagctcacccaacttgaacacattatcaaacgtcccgatacctacattggatccaccgaacgcaccacgcagcagatgtgggtgtacaactccgtaaccgagtcgatggagtaccgcgatgtctctttcgtccccggtctctacaaaatcttcgacgagattgtggtcaacgccgccgataacaagcacaacgacgagaacatgagcgagatgcggatcaccattgaccgcgaggccggtgaaatcagcgtgtggaacaacggacgtggtatccctattgagatacactccaaagagaagatctacgtacccgaacttatcttcggccatctgcttacttcctccaactacgacgatagccaacagaaggtgactggaggtcgcaacggcttcggtgccaagctttgtaacgtcttctcgacagagttcaatctcgaaacccaggactcccgtcagaagaagaaatacaagcaaacatggacccagaacatgacgaagatgggcaaggcaaagattacagatgccaagggagatgattacaccaaagtcactttcaagccagactttgccaggttcggtatggatggcatcgacgacgacttcgaagcccttgtcaagcgccgagtctacgatttggcaggtacggccaatgttgctgtcaagttaaacggcacacgcgtccccattcgcagtttccgaaaatacatggaaatgtacaccaaagccattcgcaaggagcgcggtgatgatggtcctccctccaaggatgaaattattacatgtagccctgaccctcgatgggagattggttttgccgtttcggatggttcattccaacaagtctcgtttgtcaactcgatcgcgacaacctcaggcggaacgcacgtcaactacatcgccgatcagatttgtacccgcttgtccgaccaggtgaagaagaaaaacaagtctggagcaactctgaagtcagcgcagattcggaaccacatcttcatttttgtaaaggccttgattgtcaacccggcattcacctcccagaccaaggaacaattgacgacaaaggcgagtcagttcggtagcaaatgcccccttgatgaagatttctataagaaggtcttgaagactgaggttatgtcaaatattttgcactacgcggagcaaagggccgaccagatcttgaagaagggtgataccggccgacgcacgcgtatgaacaacccgaagttggtcgacgccaacaaggctggtacaagagagggtcaccactgcaccctcattttgactgagggtgaatcagccaagggattggccatggcaggcagagcagtcgttgggccagacttgtttggtgttttccccctgcgcggaaagcttcttaatgtccgcgatgcttcttttgaccaaatctcaaagaacgtggaaattcaaagcatcaagaacttcattggtctgcagcacaagaaggagtacaccgagaccaagggactgcgatatggccatcttatgatcatgactgatcaagatcacgacggtagtcatatcaagggtttgctcatcaatttccttcaagcgcagttccctagcttgctcaagattcctgagttcctcattgagttcatcactcctatcatcaaggtttggaagggtgacccaaagaacccgaccaaacagaaatcgttcttcaccatgcccgaacatgacgaatggcgtgaagcccacaaacacgaacgcggctgggaacacaagtactacaagggtttgggaaccagcaccacagaagatgcacaggtttatttccgcgacctcgatcgccacctcaaggagtttcacaccatgcaagacggtgaagccggactcatcgagctggctttctccaaaaagaaggctgatgagcgtaaagagtggcttcgtcaatacaaacctggcacattcctggatcattcagtggcgaagatcacatacaccgacttcatcaacaaggagctcatcctgttcagtatggcggataaccaacgctcgattccttccgttgtcgatggattgaagcccggtcagcgcaaggtgcttcacacctgtttccgtcgcaacttgaagaaggacatgaaggtagttgagctggcaggccatgtatccggaatgacagcctaccaccacggtgacgtctcccttcagcagactatcgttggccttgctcagacctttgttggctccaacaatatcaactgcctggagcctagtggaaactttggtagtcgacttcaaggtggtggcgattgtgccagtgctcgttacatctacactcgcctatctccctttgcacgcaaggtcttccatatggccgatgaaccattactaacttacaacgaagatgatggcaagaagatcgagcccgaggtctttgtgcccgtcgtcccgatgattttgatcaacggcgcggatggtattggaactggttggagttcttctatccccaattataatcctgaggatattgtcaacaatctcaagcgcctgatggctggcgagccgactcagccgatgcagccttggttccgtgggttcaccggtgaggttgtagccgtcggtggggatcgcttcaaattcagcggtatcatcagggaatgtggtgataaggaggtcgagatcaccgaattgcctattcgaacctggacccaggatttcaaggacaagcttgaggatatcattaaggctgagaaggtgccatccttcatcaaggattacagggactacaacactcacaccaaggtccatttcatcatccaactagatgagaaacacatgcaggctgctctgactgaaggcttagaagaaaaattcaagctgaccaagtcgattgcaacaaccaatctagtggctttcgatcccgagggccgcatcaccaagtacgccactgtcgatgacattctcaaggagttctatgttgtccgtctcaagtattacgagcgacggaagcagttccaacttgccgaactacaaagagatctggagaagctgagcaaccaagctcgcttcgtgaagatgattattgaaggcaaattagtcatctccaagaagaaaaagcctgttctcatcacggagttgaaggaaaagggcttcaagcccattgccaaggtggctgaggccgctaagatgggcgaagatgagcctgtggtagaagaaggagaagaggagttggatgaaactgacactcaagtgctatccagctcatttgactaccttctgggtatgcctatgtggtcgctgacccaagagcgcgtggacaagctccttcgccagattggcgacaaggaagcagaagtcgacgtcttaatcaagctgtccaaggaggacatctggacccacgatttggaggagttcatcaaggagtggcgcttccagcttgaggatgaggaccgtcgcgcccgcaaggtggctagcctggaccgtcgtgtctcgactaagctggccactggtggtggtcgcgctgcggcttcgcgcaagcgtaaggttgctgctggtggtgatgacccagacgacgaagacttcggggcccctaagacaaagaaggccgccgcagcaaagaaaaaagagcaacccaaaaacagcttgatgaatttcctcagtcaacctccaaaatcaaccccatcggccgcagcagggggaactgactcggacgatgaattcaacatggacatggagatacttccgaagaagagccgtgctacctcaaagcctaagactctgcctaaagaagaagacgactttttcgatatcgacaacattccccagacctcgcaggcatcagctcagccagttgatgatccgatggacgtagatgtggatgaggtgccaaagcccaaaccggcagccaaagcaggggctaaggcagcggccaaaccggcagctaagcgaggacctaagcctaaggctaaggtcgatgaggattcggatgacgatttcttggagattgccaaatccgaggcttccaagcccgcagtgcagtcctctcgcgctcgcaaacctgtgaaatactcagcgcctagcgattctgacagtgacaacggtgatgatcttcttggagacgtcagcatgatggtcaaaggcattggtgctgactcgggcgccgattctcgacaactattctcggagcgcccccgttcggaaagcagttccagcgtgaagactgccgcgaagtctcccaaggtcaacgacgattttgatccggatgagactgactacagcaagcttattcctcaaaattccccacgacgctccatccaggtcaagcccaaggacgtcaagctcgataacaacgatgaagatgacgaggaggaccagccggtcaagacaaatgctcgggccaaggctgctcccaaatccaaagctgccctcaaggtcgtcgatgatgaggacgaggaggagccagtcaagacaactgctcgagcgaaggctgctcccaaatccaaggctgcccccaaggtcgtcgatgatgatgaggaggacgacgacgagccgatcaagccgactgctcggggtaaagctgcacccagagctaaagctgccccgaaagccgctgctgccacctcggcaccaaaggcccgtggtcgcccaaagaaagagccagctgcgactccgaagcccgctcccaagtctgctcccccggctttatccccggcggccaatgcatatggttctaagcacagcaaggcaagcaagaggatcgcggatgattattcggaggatgacatcgacgcaatggctaatgacattttggattccccggcgggcaaagtgaatgtggatatttcagaggacgacgagccggctcccgccccccgtcgcgccgctgcaggccgtcctgctcgtggcgccgtacagcagaagaagtcctatgtcattgaggatgatagcgatgaagaagcatcggctgatgactttgacgaagacgaagatgagagcgactaagtagtgaaatagtgagggtcggaagcccatttgcgatgttctgctttttttttttgcgacgctctttattctggtttttattttctttcatttccatgtcttactttattggtattttatggagatctggcagagccagtggatgcaaggcgaatatgcgatgttcaatcttacttttctatgcgtaaatctttcaaccgtagcctcgaataggctgtttggaactccacagtgtcaactaatccatcgaggccttcaattctgtttcatacaaatctaataaagggacactgacttgaataagcaaaccctcaactcccaagttatcaaatcacacaaatgttcctcacaaaatgcatagagacaacaccaccagcaaaatcttcagctcctagaccataaacgccgttccatgtcaagttcgtagcgtaatcgactatcaaagcgaagctcgacgtcgcttacgactccgaaattcgtccccatcgagagagcgagtgccggaaagaggggtcaactcgtcatcatccatgtcagtctcggttccgatgctttcaagctcattcatgtgcagacgaaggagagcttcagcagcctttacttcacggttgaagtgagccgacggctgaagacgcagagctcgggactttcggctggggtacttcttagtctgggattcggggctgataggaccgtccttcgtaaaagaagctcccctaggggtcctcttcagagggggtccacggtagtcttcatcatcagcatcgtccatttgccaatcatcatccgaatcggtttcatcatagtcgctttgcatggtagcgacatccgaagcggtgttggtgggctggtcgaggccaccgagcttgtcggtttccatatgcccgtccatagaaggacagtttggggtagaatacacgttggacgagccatcgctgtcggtgtcactgtcttcgctgaccccagggacattctccgggcgcatagcatctgagatggcacgaagaatcgtccgaggcgattcgaaccgcgagcgaggtatcacattggagctgcgcggggggttgatgggcgtaaaggcagacatagacgactggctcttgggcgacatgcagtaaggctccatggaggagtcccgggcgctgggatcactctcagcgtaatgggtgcgcggaatcttgagtggaggcagtttcaaggacgagtcttgtcggcttaatgctcctataccatggagaagggtatgggttgaggaaggggtactgattgcgggagggctgcctccggtgctagagctagacttcgtctccaaagagcgatagtagttggaggtgtgggtggcacgctgtacgatctctggagggatgaccatgcggccgtgggtcttgcggtccgttggggggatacacatggctgggaagtctgtgccaaacagtggagtcagggcgtatcggattctccagcagaaggttgctgccatggctttggcggcttcgtagggcatccagtatcctatgtgaaaagtgaaagtgttagaatcacccaaggttcttttggatgagaagaggatatcgatcttaccttgagcagaaagtgctccaccggtgatgctgtgacagatatcgcgcaggccggggttctggttcagcatcttggctggcatggtctatagtgagttagagataccaaacatatcgaagatctatcgtatgaacttgccttggggtagccattgcatttgaaaaggtgtgtaatccgaacaataccgatgttgtagtcccacataacatgccattccttgtcttcgccgggtatttggaaagtatattgaaatactagatgaaagagtcagacgtgaataccaaaacatgctcaatggcacataccatggaagctatctcggccggtcttctcttggaaggttttcttgtcgctggcataagggatatgacgaggatagtcagcaatgttgcccatgggacgtaacgagagctctctgtgagccttctccagatctgcatctctttcctcgcaaggaggatagcggcactcgccctggatcttgccacggcggaaaattggggcgtccttggccatctttcgcttctcttggacagggaaaggcgggtaaggaattcgcctttcgggctgaggattcagaagggagttgatagatagcattaagaagttcaagtgctatccttgagagaagaaaagagttgaagaaatacgaagactctagaggaaagaagcagcttaatgtctctttggaacaaaaggtgttttccagaaggatgaaagacagaacagtcaaacatgcaagaaaaaaaacaaagtagagcaagacaattcaagacctttgttcaaaggtttgatgtttgttccgcgcagcttctaaaggtgaggtaaggtgagtcaatacagatgttgtttgttggtaaagtcaactttcgaggagacagacagcggtgaatagaagaaactcggatctgagagttgtcttacacgaagaatggtaaatgggcttcaccgattctttgcctctctcttttctctccgcctctctcatatcacaagagtgaagtcggacgagtccatgggctgtttgtctctccgcgtggaagggaaagttcccaatgatcttacactttggactgatgatgcagtgtacattgatttcattgatatccctggaaacaattacaaaatacagatattgagacttgtctctcatctctcgaggcatagcctgttctacattcacacctgcaacttcccaagcctctaaagtgatccgtgaaagaaaagcatggcagcaaccgtttcaggaaccgtgaaaacgcagtcaccgcatgcaaacagcctgctacgcacaaaggtgcctaatattatcctcaattatgatgtaaatgctaatatcctggggtagagagctcaaccgttgtcccaccatctttctttttcttcagaatcttatcggagaacgcatgccagatcttccttgtcattggactggagggtactgagcaaccggagcattaggacaacagtccaatggcccaataagaagctacatactccatagctcggcaggatgaacattaaagaggtctcaggctcacgggaagctgcagggcttgtatgacaggaagctgcattgcctaacgagtccgcgaagtgcatctgagaaaagctgtgctgcacagataaacttctgacagaattaacgatactgggaaaagtgacagtaatctctccacttgcgtgtcacgcttccttgcctacacagtgtaccctagactgtgcaagcggtctataaatttgatatgatgggggtaaggctgaggatacaaaaaaatgctgatcatagactagaatgttctttattgtctattaaatgcaggtttgcacctcggttcttctctttttgtcttggttaatgtctatttgaaactatccgaattctcagctagaccgctggttgaaatcccagggcgtgggtataacagagacatggactctgcggagacgcaagagacataacgacttcaaagaatattccatgcatccttctatgcagtattccgacacgttggtggctgctagagcccacttttcctttctttatctttgggttttcttttctgcttgaatcaatcaacttataccagtgtcacagtgacttcccccagtccgtttcgcaatccgccattgtacccacctgccagtctagtgtagtctgcataagacttccaacaggtacaagggtccttccgccaatcggtgccgggccggggtagcatcctgagcactgcagaaaacggtgcatatagatgccggcaggacgctacgcaatctagccagagactgtaaatatcgaggactggggtttcaactagatgtcaacccaactgggctagtttcgagtgggatgggttcaattgcattggagtcggtctgcacagagtcccaacagccgagaccgctacgagagtctggaaacgaggactggtttccaatgtcttagacactctgctgctggctaaacatcctccgtcaaatcacaaagagcggtaaaccgcgacatgcgtgtcccctcagcgtctcagatcccggacttctggaaaaggggcaagaagccatgtctcaattgggatgctgctgttggtgtttaggcctttctcaagcagctattttcatgcctattcatttccataaagtatgatcgagcttattcgtaacatcgactctttcaggttgcccttgggcttccttctttcacgtgtttatcgaaaagtcggactcattgttcacatcagagctggacactcttggagatgatgtggtatcattacagtaggtctcagactcaacggtgaaaagagaacacaccaagcgtcatactcgcatgagcctctaaatccatgtctcaaccaggtgaaagactgacttctatcacaaagaggtccagacctcgacccgttgaacacagaataccaaccggacccgaaccttgagtccagacgctcaagattcacaagatactcctcgcccgcagagatcagacaacaacccggaatctgtaccacagcgaatccggggtatacggggtgtgagaggtgaagggaaacacagtcccgagcacgactgaacaaggcaagtcttcgagggagaggggaagtacaatgagatggaaaacaaaaccgtcacaggctggtccgaattgcaatatgacgaaaagggagccgggttgattgttcctcatattgagatggagaaagagcaaacctctacggctgtatgggtctacaacatagtaaatattcatgcctcaacggaaacatctccatgcgaatccattgttaaagatccctgctccaacaattctctgattttgaagttctgactgcatcatgctatcagttctcccaggcgcgtgaacagctcaacttccatccgctcagccgcatctggctggctaagaatttcgcccatcgggtcttctccaagatcctcctcccatactgtctggggctctgcattgaccttcagactcttgtacaggcacatccgtaggtgccaacgaaggaggttggcgctcacacgcagggttccactcagagcagagtttctaagacgagtgccaccaattcccgtagtatccgttacgaatacgatgatcttgtagtcggcctatgtcacaaccattagtatatatcggtagggtcttacatcggggtcaattcctatttcaaaagcatcgaagtgggtatggatgtcggagcggagaagaagcccattctggggagaataaaggccagattccccaatctcgctactaggcctagtgtcggtaatgtaccgccgatatcgatttcgttgccattcatccacattactaactgggaatacatgcgtagcttcgagacctcggaaaggactccgacggctggctatagcattcggcccagtaattgcacatgcggcgtctctagtgcggaggctgttgcgaaatttattctgctgtagaaattattagtactggttttgtatgcttaatcatttacacattccctctgaccctgggattgggaatcggcactttgagttctgacacggcgtggcgcgcaatttggtattagattgatgatgatgggcgcgtgatctatacgattgtcaaccttggaaacgccagttatgctagatgtgtcaaaaatacttagatctagagccacatagttaccaggattcaccaaactcgcactgttatgctggagtgcagtgtttatctggtgtgttattggcttgcaacttataaattgcccactcgttttggttaggggagatgaacaacaaccaacaatagcgacatagcatctcctcggagatatatcgagcttgttggacagttgggatttccagggctataacaaggctgtattagtcgcactggctcctataaggctatcgtgacttaccggcaagaagatggccgtcgctgtcatatatctggaggtaccttggtgtttcaagaacaagagctggcatagctgctgtcatattggagttgatgaaaagagaaagagaaaaatgaaaacaattgatagaaggcgactatacttcccgattaggttagcttggctctgatgtcatccttagattcctcgggtgtctgtggtgctaagtcttgcaaagatagaagtgttttcaatgcagaataactaagatggagagaaagaagaagcaagttgcaaagtgagaagcagcctgttgatatagctatccctttgcaaacatcgcaaccctcgagcccttctcttagctagcaaacaataagaaaagcgaaggtaagatcatgaatttatgtaaatgtagttccattagaaacaatatgaacccgaaaaagacatagacagggtgtttgcggaaaagaactagacaggtaaaaatgcccagtatgttagggggaataaaataacgaaaagaggcaatatgagacatgaaaaactcattcatcgctccaagaatcctccttattttttgtccgtcgacacgaggaattggtgatcagagcgcatgtattcccaaggaatccccaacaagaacaattgacttgacaaccgatatcacgtgccatttggtacatccagcaacagtcatggccagaataatgatatgcattcaccaaagaattgattgacgctcaagttcgaggccaattaacattcccggttaagatggcctagtactattaagacctattcagatagccagaagaggctcacgacccttcgcctgctctgccggctcaacagacgcaacaatgccagactcgagagcctgagcgacaggagcggccttgggggcctccgggaagtcctcgtgcttgataacgggctcgacggcaggcttggcgacaggggcagtgaagttggcagcgggctcaacggtctcacgcttgatcgggctcgcaagcttggtctcccgggaggcagagcgtcggtgggcgatgtaaccttgagccttagagctgtactcaccgacatactgcttcaccaagtcggtggcgtgagaggtacgctcgccagccatgtctcgaagctggttggtctgggagttgatgatttcctggtagttggtaatctgctcgtcgatgaattcacggttgctgatgtagatcaggggggtgaagtatgtggtggtcacggcaatcaaggccacgccccagaagggaaggaaacggagcagccagtagccgatgaaagcagcattgaaagcctaagccgttagtctctgcctttttatcttcgttgataagttcaaagttgcaacctacaaaaacggtgtggaggacattctcagcgaacaggatgcgctggaactcgatcaagaaaaagtccacgagctgctcgaggtcctcgaggacaccctcaataacctccttggggacagtgtagtaacggcgggggcggaatccactggcgattccccgcttgaggataagatggccagcaatctcgacagtggcggtcactaaacacaattgttaaccaaccactctgttgaccgtaggtcacgcgaccaactcacctcccaacgacatgtacaggaacttgaaggcccagcggaggagaggcatgtaacgagcggcgaagatgaaacagatcatgctggcgtaggaaacggcggtcgcacggggttgttcccactatatccagagaaagattagcaagctatccaacttgaagactcgggcgacaactcacgctcaaaaggctgtacatcaaagagtggtagtctagacacttgtcaatatcccatcacccaattaatccagttcttatgacctacgagtcaatggttgaccatcggcggtggtgttcgaaggggtcacacgcgagtttttcagatcgcggaactcatcgctggtgcgggatgcttcggacttcacattattgacaattgggcctgtggatgaactagtcagcttgctttgatcgactttcggagactttcagacgcctgcttacccttggtaataacatcgcggatgcctgaacgcaaaagggtcaaggtcagtctctcccacgaaatctagggaaaagaaaagagcgcaatactgtggggtgactgaggttagcatattcatgttgtcgaatggaattgacttggttctcttaccttactgcccgtgttagggtaggtcacgtcaccagaagccataacggtgagattgtgagaagcacttcagggggaaactttaaaaacggaattagaaaattcgtaagaagcgtatcaaccgagtcaagacgtgaaatgcagaaaagaaattaaaggggggaagggggagaagaagaggaagagaaggtgagagcacagaaaagataaggaaggattctcgacttccaggttgttgtgatgctgtcatgtgcgctgccaagccccgaacagctctggattcagggcatttgtcttatgacgaatatctacctgggaacatgtcttataaggagtacattcactggaaataccttttattgggaggggataactggaaaatacatagtctgaccttacaagtatgtttgttgtacatatcaggccactccgagactattgtgtcttgaacgccataccccaaagctatatatactccacacaatgtcgatgtacaacatagctatgacttcatacacaaccaatcacaactagttccctaaccttgagctctgatgcaatactctatcctacccagctgtaccccagaatccaaagtataagctttaagactgatttctgaatcgatttcgcttccatgttgggtaaggaccgtaaggtattccaacatatgatcgccaatccccgctagcatatttagcctcatcgggtccgaattcggtaataatctgctattgatctgttattagaaatggcattatattaggagtatcctaggtttcacttttctactttcttctaagtcggctatgacaaaacaaacgtggcaggtcattcaacagtacttcggttgccctaatggaaaagcaggtagctcccccattttctgccttgatatcttgagaccatcaccaagacatcggagtatagtacttctcccaatgaataggcgtatcagccttctggaacttttccatccctccagaaacgccatcctccgtgaccacccaatcacccaactcaacacgctctgcccaactcgtcaataatccaagaactgccaatgaccccatacagggagaagcccagagtagcagataatttgatatagctgatcggcttcatcggtaagtaggggaggattcgaagacggaccaagtagcaggtcgttgctacttcgcgcatagccattcgcaccgataccaaacggtaaaagtagcttacactgatttccatagtcttgcgctatatcttctatgtaaagatcagtagggataaactctagttccccatcagggaaccagggtccaacctaaggggatttgctctctccctcacctctgaatagaagcagaggaattggatccttctcgttatagtcgatcctgttactcaaatcagagaaaagcttgggaaaaggctgatctgcaatatctgacggcgattggagttgaactccgggagcgatatatcggaacgaaagacgtcgattcggaagagcgagaagaaacgatcggagaaaagtgtcctcttttatataagcctcgccgaggaccgcggtaggatataaaagatctatctgggtctggagcgatggtagcgtaaacttggagtcactgggaagtttttgctcaatagcgtcgataagtcgaacaaaaacggccactgctctttcaacgtcacgctttgtgaaagtttcaaaattccatgaaaagaatttcgaaggcgttgaagacgtgtacacttttctatcttcaatcatctgaaggtacactgtaagaatatcctgtagaggtctccattgccatgatttatcgcaatcgcaaatcagactttcccagtctggaaaaaaagctgtaagctctgtacctctgatcgaagctaacttatagttagaatagaatagtgatataggacaagttgatcacgaacatgatactaacttcttcaacatcgaccgccccggtagccggatataaccaaacaaaacgatcaccccatgttttgagggttgaggaataaaaaaacgtgtttgctcctgtaaactatgcaaaaaataaaagaagcagagacctgagcctattaccggggcagaaactaccttcgccagacgtaggaacgaaaccagattcggaatcagacgggaatcaatttcaacgggagcggaagtttgccaccaactagtggaagacaatgtagacaaatcatttccggccgctgtccatgcatattctaaaatcttgttgtgaagatcggcagaaagtgccgggtcaaattgggactccggcattagtgcagactagcagccagtagggcggacctgatagggcgatcaggaagctttcacggatgacacgggatagaacacttcggacactgaaatgagggagttttgcaaactttgctggataaatacgcccagcgagggtggcagttaactaaggggaccagaagaggcaaggatcgcgctagcacgctaggctatatcaggaggaagtagggtgttattgcagggtccaatgtgatatgtttagcttcacaaggtgctatcaaattggactgaaaatgttgaaatgggcgttaatgaaatggatgaatggggttgctagtgggattgagaagttcaaagacactgatagtaattaagagaagtatcagatcccgttgtcttgggtgaaatgagtccttatgctatctaaatacctgccaagatgacctggcagcatcaaattcaagtctgaatgtagatatataatggcgatacagatacgctctcacgctctcacatccagatatacagtgtcagttggacatgcaccccaaatgagcctcaatttgggcgggaatacgatgatcctggtgtcactcagtgcaccatttcacgtagtatcagaaccccacaaatttgtgcatccaccttgagccctacggccgatattcaccccggatttcgttgcccctctcaatcgagatattcgcgctctgtccagaggtcgcagtttcccaggttctcgaggtgacgatccgaactccatcgtaggctccccttccgtggccaccgtattgatatctccctctcttcgaatgacatcgagaagaacgccgtggccaagccaccgacgctgctttccatgacaccggcttctcgacgtggtcaaccatggcattgacgtgcgctggctctcccaggtgaccgagaaattcccacaagagcatcaccaatgaggagaaatggctggccatccatatctacaacctggaccaccagaagatccgcgcgagctaccacctacccatttcggcaattaggccgtcgagtcgttctcaacccgatctttgacgagacaaagacccgtgaatgcagagatagacgcccatgtatgaggtaaacgagaggccagacgaggctaaacacccgggcttccgcgactttgcgcaggagtactactaggatgtctcctgcgtggggacgccgtgccgctggacatgccggatgacttcttcacggaccacttcaagtgcgatgacatactttcgtccgtcgtcctgatccgctagccgtttctgacagacagtcccgcgaccgccatcaagaccgccgacgacagcaccaagttcagcttcaagtgaagacgtctccttcaccgtcttgtaagtccaaagtgcaggatctcaggttcgaacccttaatggtggctagacgtcaagccggatgataccgggtatcctgtcaaccggcagccacatggcccacatcaacaactagtactccccggcgccgatccaccatgtgacatggatcaacgccgagcgctagtcgctgccgctctttgtgaatctggactaggagaatgaattgtgccgtgagatcctgcgcatccggagattccgagggcaaggacaacgagcgaaccatctcctatggaattatctacaaagcacaggatggactatttggatcgaattaggctttactactccgtcatccataatatttagtccttcaagggaagcgattaccatctcggcaagacttgactaagtccttgaagcctagttctagctacctagttaacttatgatactgaactaacgaactactcacgtagttaaccagttaactaacagaagtaactaatagacaggagctgttacgaatagaaactgtcaaaccgtggaattcaatatttatggccggaaggggaaggaccatggatcgacagcttgtacataggattgtcttccccactattgatggcctgatccttatcctggggatattctgacaacatacgtcaagcctagccctacagggagttcaggactaccgagtcaaggactaaggtgcagggatttcactggaggagccgtcatttaacgctcactgatgtcaatacaaactgcgtcgaactcaagtatatcgtactttgttagtctcggaacatgtcactgctgatcccgaatatttactagggctaaaaaggtctggattgttgttggacgcagtgacttttttttttgtcacgccactcgccactggtgaactatcccaggacatcagaactgaacgattttaacggaatttgccggttctgtttattattttgtctccacagacgttattttctatgacatggaaaattcttcagccaactgccaaaatggggttcatgcttcatgccacccaacccggcgtgttccgcagccacaacagcgaggaaacaggttggctgatagagcatcagttgacctaatgcagagcttgactaaatgacgaaatgacgaaatgaagatcaatcgaaattgaattgcttatattgagcttcttctgcttcaaagtcttgttttttcttttctacattcatcagcaacaagccttactctccaatcagccaagtcaatctgccagcttcaccagctatggaatcattatctgctttcgtcaagcgcaatgacgcgcttaaaatcaatcctccttccgccgctatccatatcactagccgtggcagtgactggctatggactgtctttgcgataaactacttctctcttgtcgtcttccttggcctcttgttccggaccccgcgcagagaccgcatcttccactacatcagtatcctgaccgttactctctctggtatctgttactttaccatggcttccgatattggctctattgctgttgcccccgaatgggtacgaagcagtcatgaagtcgccggagccactcgacaggtgttttggatccggtacttggactggtatgttaatcctaccttgatctaggatccctgatggaggtgactaacgagctattaggtttactacgatgcctttgatcattttcaatgtgctgctgacagcgggtgtctactggcacaccatcctatacactgtcatgatgacgatcatctttgtcatcctgttcttcgtcggtgccatcgtccctgatacctatcgctggggttactacaccatcggcaccgtggcgcttttccttgccttggagaacatcgtctgggctggcatcacccacgccaatgccctgggtggtaatatcaaaaagttctacaccttcttgggcccttacgtctttatcctctggatcctgtaccctatttgctgggcctgttcagagggtggcaatgtcattgccccggactcggagcagatcttctacggtattctggatgtgttcagcaagcccatcttgtgttggattatcctctttgcccacacccgcattgatatcacccagctggatctccgtctctatgaccgtggagatgtggagaggaacactccaagattcaatgagaaggaggaagagagaggtgtggccgctgccaacaacgatcccgcccaaaatgtttagacccctgtccgataccccttgtctgataccaacagtcgagggattccctcgctgaagactcaaattgcgttgcagaagtgagaagtgcttcggcactccactattcccaggtatatgtgttattgcccttattgccctacgagatacgtcctatctgtatttatatgaacatatctaataatagtccaatttaacctcgattaatatatgcagacttctattcctattcactggctctgctataactagacaacaatccaatttctgaagctggccagatggccaggtacagtactccgtattccgagcgacgatatgataaatattgcgggggccatctcggggatcatcattgtgcctgtcattcagaaaggactctatccttaccttacaaagagatgagtctcatttggaccgattttacggatggcgatggcagtcagctccatctcctgactctctctatagtttacacttacctaccagggccatgctatgatacaccactcgcatgtcctgcttttaagttctgacgtactttggaacgttggcggaggtgttttgccttaccatgggaaccgattatgcttataaccacccgcctaaccttgtaaggctgtctaatttcgagctctcgcagtctactccgtaccccgtcaaggcttatccatgtacgtattaacctcgtatacaatttaaattttgagtttgattgcttaatttatttcgcttaatccctaaaaatagatatttgatgataatagttggacgatgcccactattatcggaggcagcttcgcttcagcctcggtctcagcctcattgggggcctaattcggtagtacatactccgtatacaacatgtgggcattcctctctcctctctcatttccattttcaaggcctaaaacgaaattgttactgaaaatggcagagccaaacctttctcccgcttgttttacagagtacaatgagcaaacccaaagcagcctattctcgctcctacctccagagattcgctatgagattttcgcttacgctttgacaagtgccccggacaccaggcaacgacctgagcgagatggatactgcaccagaccaggctatgagaccccccatcgaacctacacagaactgctccaaacctgcagaaaagtctacatggaggcatggtttatgcccttcatctgttcagagcatgcattctggatggcctcgtcggaacgtgttccggagcgaattatcacggttgagaagatgcagcaatgtctagatctaattcatgatcgacatggcgaagtgcagggcggccatattcgagtgtttcctcagctatggtgcctcgaggggaccaaagacttcaatggtatattcgccatgcgtcatttttatcccaagtctgtcaccatcactatccgatacaccgacacctggtactgggaatcaaatgatgagttgcacattgaaggagagtggggcagatggctggtgctgccctctagcgtcaccaggttctgcatcgatattgaaagcatcgagcgacgaaaagacgaagtagactatattgcgggcgaaatggccgatcgatggcgattccagcgcgccgatggcaccaacatggtcgcagccagggccgatacctccgtatccagatggacgggaagttccatgcttggcggagagcgctgggtgcgtgatgaggaggcgcctggtcagcttcggtattattttgcgactataacgtggcgaccttcgcaagagcccttggatgaccagggtttgaatcctcctctcgaagtcgattggatccgcccatcaattccggatttgggctgtaattatatcgaagaagcggatttggacaggctcggaatatccatgacagttcctgctgaacaagcggttgctgaatatatcgctgacagggatcgcaggcgtgatgtggtagagcaaaccgttcgccaggttttaccttttgtccagggatatgaagcgcttgcactgcgtacacctacagctagacctagaccgtctgactatgacctagatgaagaggttcaggttctaatttggcataattgggtttgaatatgtatttccttctcaatcgaaattcaagtgttcaagtgagaatcattccaacgaaaatgtaaaagttaccataacaaaataaaggaccacgtgacccacgcgttgccatcgaacccgattaggtctgttttgattctcattccccgacaacccagcgcgacccacaacccacaatctccatgattgtgcatttacgatttacaactctccctatacgccattaattgttagcttcatttcatccactttcgtcaacggcgcgttgtctaggtcatggcggcaagcgcgagggcgcagaagcctgtcggctcagcgccatggattgcagcagagaaggaaaacatggcggagcttgtagagcaagaactcgaagaagtggaataccctgtccgacacgaactggactggttaaatgaacatatgaccgagatattatccaaaggccaggcgtgagttgcgaccgcacactactatatgtgtctacttagctaacaatcacacaggaacttcgcggacgtgttcaagacgcccggaaagatgagaggtaagacgcctcgaaccgctcggaagcgtaacccggaagagtctcgagtggtgagtatttttcatcgaattggttcaacagctctcgtctaatgcctcttgtagcccttgagcgagatcttctcatccgcccagaaacaaatggaaaaccaagcaagcccgagcccattcatgcatcgtgttatttctaagcccgctccaatgacggcatcgcctgtgccccgcaccaatatcgtgacagagcaagcttcgcagcccgaataccccgatctcacccaaactctgaactccttccccacatacaacactgactcgggctatcatggcatgcccgatgatgatgagatggtactgcctgacgtgcaacaagaatcacaggcttctactcagccttgtacccagtcttttgaacaggacgcgcctatgaatatggatactcaagaggtcgagatctcggccagtcaacaaacgactgaagaaaccttccactctgcgcgggaagagatccgcttccgtggggagaccgtcgaaccaaacaaggacccaaccccaaccccagcaccagctccatcccaggagcgaacagcgcgtccagccgcatcggttcccaaggaatccgagactgaaataatgtcgactccgactaaaataagaaaatcgaaaccagatgtcaaaatcccggaaaagcaactggacgaggaacctgcaccaaaggacagtgatccggctatctcaaaacccgagccatccccggaaaaggccctggtggccccagtatccccagtagctccacctatcaagacgcaagagtctcatccagaggacgaggatatggaggatgccaccgaagatgctacggaagacgacacagttctcgacaatcttgatgatatcggctctccttcggacggttctactccagagcgaccattcgctcggaaaagcagcttgagctttgccactctccctgcgcgggaacctttgaagactcgaacaagccatattgacctggcgaaaatgagtactgccggacgtcccagttactttggcaaacagactggcggccataggattccgcaagctgcagcagatgataattccggtcccatggcgttggaaattgacaacgagaaagaaccaagtgacgaagcagatcctgaccaagctaccaggatgcacagcaaaaaatccacccagtccttacatgatagaatcagcatgctaggcaaactccagccatcccgaccccgaaagtcaatcccatccgcttctgggctaccaggtcagattccctacccagaccttcaagcttccaaggctgaagcaaagtctgaagcttcgaacgaaagggcacaggaggctccaacttcagagcctatgtcggtggacgatgactggatcaaacctctgagctctccccagaaacatgagctttccaggagcaagaccacagatgtcatggagaagcttgctgaattcgaaaaggcgcaagcagtcaataaaaaagatgcatcgcaaacagagcctgaacgtcccacaactacctcgatgttctcttcaccccgaccgcacagctaccagcaaagcgcttcttttcctcatatgccggttgatacatctactactccaacaggttcaccaagacgctttgacggtcatctcagtgcttcgaagctgaaactgcactcgattatgaaatctgccaaaggattgttctccagcactggcgccaccccacggatggaacattcatcgcctgagcaggcgcgcattcagccaggtgctggctcactcactaaacatgacaaacatttatctcaaccagtccctatcagcagtcctcaacgaccagaaggccggcgcacacgaagctcgaccgaaaaagaggagaaacgtcgccagcacagacgcgaagagcaggagcgtgaggatcaagaagaagaagcacgtgtcgagagagcccgggaacaagaaaagcaaagggccctccagctcaaatccgctcaggaaaattcctcggtcgagccggaagagagggcaggctcagcagtacacaagacctcccagtcacaacgccaacaatcgcgtgaacctgaattggtccaggagtctaactcgaaattttccatccctcagccaaagccaaatgaccgtcgtcctctcaaacccactcgcgagcccgtaaaacgcccaacgccgcaacccatgtcaattcgtgtcggcagcaccatgtctcgtcaacaaatccctgttccgtcgtcttccagtgctcaggagtcgagtgtgtccgtagccacctctgcccctgcatccaaaccaactctgaaaaagaagggtagcaatgcatcattacatacaacatcttctgcaagcagctttaagagctctatttccagtcaaacgcaagcccagcgcaaggctcaggttgccagcgaccgcaaaagggagcaagaccgcgaggcacgccggaaggaagaacagaagcgtgagatagaacgcaaacgtgctgcccagcaacaacaacaagatgaggcccgtcgccaggagatgagaagtcgtgctgaagctgaaagagagcgccaagctgaaagagaacgccaggctgaaagagagcgccaggctgaaagagagcgccaggccgaacgggagcgtcaggccgaacgggaacgccgtgaacggtcggctcaggaagatccaaataaagccgcccgtatggaggcgatcaagaaacgacaagcggagaatgctcggaagcatgggcggcaaggcagccagcaaatagtcaacgaggtaagcgccttgttccaattcgggttttcataccgctaacagtctccagggaccaattctgcagcacgagcagccttattctcagtcttctcaacggagtgacttgggttcttcccgtcctgcttctcgcctgggtagctcaattcaggcatttggcggccgcagcatcaacccacctccgcctaaccccgcgaaacccccaaagagaggcaacgatgaaaacagcctgcggcctgcgccgtctaaacccagcagcgtgcaatcaactggcgagtttaaacggcgaaagacagaggatgagcacaaccctattccacctgtgcgcacaatggcacaacctatccgtcaatcgaatatcagaaaggttagtaacatcggatcctatgcaatcttctttcgggcaaattattgacttcaggaatctatgcagccttctacccttggccgtggacagtcttccatggcaccacagtcgggctcttccagctacagaaatgctcaacctcagcgtcccgctcatcctatagtcacgtacacgaacggcaaaataccgtttgccgaaccaaatcatgcgcctccgccaagcgcacacaagattgcgcccaactccgtccaacgcccaccagccaaaccatctccaaagtacccaagtggtgaaagtattcacttgccggagatcaacactgatagcgaagatgatgacgattccgactccgagatgttccctgttcccaagtgggcacagtcaaaggagctggagggtcttctccgggagcaagatggtatggaagttgactcgatcttcgggccgattgcaccattctctctagaagacaccttcaaggcggataagaaggtcaagaaataccgtgaccgcaccagtagtgcgaactggtccggacccgatggacttactcaggaggagattcggagagatgttgctgaacgacagcggttgcggctcaatggtggttggagattcaacagccagtgaccagccaggtgatctttctttcttgaattgtacattggtctatacaataacggctgtggccttttttggggtatgaatttggtggtggacatggttatgccggtgttatgggtgtatcatctacatgatggcgttatcttgtattattcttgtggtcacttctgtttatggttttagacaacagctgcatagttgcatccatcggagcatggagttaatgaattgttattttggccttggatgttctcagtgttctcatgcattatgttggaattcatatggttgtcaatattaggggtgggaatgagtttagacttattatgcactacagggccgttctttacatgaactagcatcattggtctagtggtagaattcgtcgttgccatcgacgaggcccgtgttcgattcacggatgatgcacttcttttttcaattttgatattagttctacttatttgagctccgtctttctaaatatcatttaaatcttacttcttttttgcctttttctcatggcacgttatcttggtagtttaaatatagtatggttggtttccttcggcgtaccatcttgttgaagacatatatatagaaccactccattgttttacccaatctattatctaacaggtatccgcgacatcagataaatgaaaaccaaagaaaggcgctattacatcagggaatcctagtaaagcttgatcatttgacggtctaaccgacatagtcttgtacactctacactaacaccgaggaagcaaaaggcaaaggaacaaaacaaatatggcacatgtgcatcgtttatggtttgtacttggccgcatatttggccgcccattcccggaacatacaccatgagatggaaatgagaaacaagaagatgaaaggcaaaaaaagaaccccggtccaaacccatgcccctggcagcgccgagaatgatataatacaagatgctctagcctctacgcagtaaagacgccgatccatcacttactgcatatccggctcgatatcactagcccctccatcggcaacctcatccatggcatcggggttgagattggcagcgtcgggtgccacaccgatctgagtctcgtaggagatggtgcgccagccagatgcactggtggggtctttgacatattcggacatggggaactgttggatgttagaacggttcgatattataaatttgtgtatgatgcatggtaagactcacgtaatgatcattcttcttcatggtaacaacccagggaacgttgtcgaaggtcacggcgcgaatacggaagtactcgttatcaggaatcttgcggacctcccgaataaagctgtctaggtctggagtcgagacgctgttgacagcagtgaggaagttagtgggcgcaaggccgtagtggtaagcgggggaaccacggctctggagaatagtgttagcggggtttgaagagatgtaagtgaggtgtcgaaactaactctcgcgctcacgtagatctcgctgtgaaccttggagatctgctggcgaacagcatggtgaggcttctgtagaacagcaccgcagaaggcaagggcacgatccgtctcaatatcctgagtcggcaccgtggggacgcggatgcgcacttcctcgccattccgtatgaccaatgcatcaaggaattccttctcatacatgacatccagctctgaaacgcgagtgatgatcttgccatccagcgtgagaataatgtcggcttcctggaagctggtgctagggtcgggagtgacgcctgccggaggactgtcaaccttgcgcaccatgaacagctggtgtcgcgatgggttggtctcggtgaccttgttaatccactcctgcgagacgcccatgatgcgagcctggctcatctgcacaacatagctttccatgtttaagattcgcaacgttgggatttcgccttgctggatcttggaaataacggggagcaggtatggagtggcaaggccgaggtggtattcgacatccttgtgagagcttgccgagcgctcaccgaggtagttcagccacaaggcctgcaccacaccgtcttcgccgacaagcacaccgtttgaacattgtgaactgagcccagtgtccacggtcacggcgtcgaggttgattgcacggtaacggggggcagctgcgttggcggggattgacacggttgtaatatcagtgacagtagtcttggccacaacaatgcggtagttctggttgaagccgacaaatatggtatcctggccttgtttgatatagtcggtgctgagctgggcgctcttgaccggagccttgacaaggctggggtcgtattggatgatggagtagttctgaagcggatgtaggaagataaccttagcaccgacaatgattgagtcggccacggtaatgttgatgtcgcaaaggtcgtaggggacaatggctcgtgatactaccactagacccttctcagcatcgatgaccagtccaaacccggtcttcttagcttgcgggtatccatctagcttcaagggcatgatgcacgatacacgcacgaagctacggacaatctcggcagcggcaggctggctgataccgtctaactggatgaaattggcctctcttgggacaggaggttcggcaggaatgggatcggcgatatcggagaaatcccagacaccagactcgtcattacggaccgccaaccgcatcttggggtgccagtgacggtcaacgtagatgatgctagttccttttgtgtggaggtcgcgaatatggcggtaggagatcaccacacgagtgcgatcaggaatgttcttcatgacctctatgaattctttgagattacggatgggccgcttgtcgattgaatcaatgatccaccctgccacggtattctccaacttgaaagaacccgccgactcgcagacatagactccgcgagtagcaatggcataaagacgtgactgctggtacgacaaatcatggaagctggcgcccgcgactgtcacgaaacgatcgggggtgatatcatgaagatttcccacttgacactcgacctcaacgtcttgaccgcctctctgaaccagcagcttgacagattcgccgacactcgagtctaggatatcgtcgagacgaacaaacttcgtaagaagctccccattcaccttaatcagcacgtctccctccagcaacttaccatctgcgggcccctctggaagaatgatctccgccgcaagcatgttcgtttcagtaggtgctgcggcacggatagcagcctcccactccgggctcagaccaagacggcgacactcgtcgaaaggcctcaagacccactgtgtttgaatcgtaccacgagtgataggctgcccttggcggatacactcgagtgcacggagcgggcggtccagcggcaagaagtaatctgtcgcagctccgtcggctcggccaccagcctgcaaagcaactgcatggccagcaagattgaccacaggacttcctgaactaccgccactggctgcagctgcggcctggatgtagtttgtattgaaatcacagtagccctctccatattcaggcgcatttcggtccaatcgactgatcacgccggacagaatgctcagcttttctccagcatcgttacccacaacgcggatttccgtgccaacgcgcgcgccatccggctggagcttgagctcagtgactgccatatatcggattttcttcgggtcgaactttaaaataccgaaatcatgaacagggtcgcggtataccggtttgacatcgcactgcgatttgacaatcttgttagtaaccagacaagagttttgaccaaactatggcgcagcatcgacttacttcttcatggttgtcaaatatgcagtatccccagaaaggaccagaaccgacaacgtgacgattggtcaatatgtagccacgctctgcatccacgacgaaaccagttgcttgactggacattgagagctctgtatcaaacgaacaggtttgacaaaagtgaatggagacagcgcatttcacaaccttctcaatggtagcttgccattcaggtgaatctgctgcagcgggtatggcaactggtgagggagctccatctgaatccccctcaatctcatatacggttccgttcgcaggcgttgaatcgtcgggagttaagactgcaggctcaggtctgagttgcttgttcggatgctcggaattatcggccgctgtgctgcgctttcgctttgcactgatatcgcccatgccatccatagcgaagagatctgaggtccggaagtggtatggacggggttttaggcggttgacgagggtcgagattgcgcgggagcctcttgaggctaacggagtagtagataatggggtatcggacgaacgaaacacgtgaaggtgtagacgatgcggagttaaggaatgtgacgcaaatgaccgattagcggcggctggagacctcaaaggaatggaggttcggtttgaagcttgacaagatgacaaaggagggatggcagtgattcgcaagctccttctgcatagagctgaccaagagcaatacatccactagagaattgggggaaatgtgtacgcgccttgacatcgaggcaaaacatgccctccaacaaggtcccaaaggcggagaaggaatagggccatattattggccgagggcgttagttatatcttaggattattgccggcaacactagtacgattaccatcgtcttcatatattctgacaggttagagtcatacaagactagagcccgttggttctgctatctagcactagaagacgtcttaccttgaaaaggaggttgatatcaggcttcagaaggagagaacaggcggtattgccgataaggacgtgcatgtctatgcgcccaactgtcaaataagtttgaatctgtttaattttgagagataggcgcatggaatgatacgttattttcaactaatgtacaaattcggaggatgctttgtagcctgatctactcaaacatgagagttcttcctcggcaaatgctcccatacttccaaagcgggggacttggagtatctcccagtcagatacagatagaatacgactgctttgaagttcaactggtcacacacgattttcagccggcagagatggtgcgcatggtggaaggcccatgcttctgtgggtataatggtgttgaagggaatgggccggcgcctctcatagagcttgcattgatggcccaaaccatgatctgagccgcagcggtagacaaatcaggagctcgacatgatatgtggcatgccttctcacgcggaggattgcatatttcctcattaattagttcctcaaataattgattcagtcatagcgccagggctaggtccaccgtttccctgcatggacggaggacttggcctttgtggggtagaagcctttgcagagcgcgagaagagctcgttgagtctgacatatagctcattcacagcggggaggttgggaggcggtgtcatgatcgctggcatttggggcacgacgccactcggtttcttcgatcgatcggcgatagtcgcgaggtaggctaggttggcttgtaggcgtcgcatgcactccatatattcggggctcttctgattggctttggatgtatctggttgctcggacgccggtgaatttgtatccgggttggagacggcgccagccttgccggcagcttgaaggttcactacctcttgcaacaaggccgagttgatgtcaagcagagccgtgacacgggccttctcacgtgccgcaaactgagcctgggcctgggcctgggcctgggccgggttcggaaccgcaggagaggcaacggtctggggcgagttgatttgtgaagggagtttgggctgtgtgccgaggaggttgtttgctgatatggaagccatgttttgggagaaggtctgcgctacttgagatggcatgttggcgccagatgtgccttgaggggggacgaactgtcccatggaggtaggtatgggggtctgggtgtagggcgctgagaagttatccatgggtgctgctattatgattaagcatggtcagtccagatattccaaaataaagcgacctggttagttggcaacagtagacaggagacaaatggtcaaagccagacaatgccaagggccaatgcattgagagcggtagggccagtttcacccaagccgtagggggtttagggtgggtgacacaagcatgagggagcttgagtggaaataattcaatccgatcttgagcctcataggacccttcctttcgaagaatttgggcaacaattctagcccggggtaaagtgacagacgcacggtgccaatgataataacaaaaaaaggggggagggtaacgaaccggaagattgttgggggaaacctgaaggcatcatagctccaccaggaccaggctgcatgggcataccaaactgttgacccgatggtgtctttgattgggggtattgaggaacagcattagggtagaaagacatctgttggttttgggggctttgagtcgggacgggatagcccgcgggataaccagtattggggtccattgtgtattgagggaccatcacggttgagggagggctcaagggattattttcgccctgtaatatttcttctccagcgatcccctcgatttagggaggctactgtggctgaattacgcaggccgcacggacgagacggtgaaggtccaacggcgcctgttgaccaggaatccagggataggcagataggcgagatcccgaagctgctagaaacaaaaaaggagagcgatgattggctcaatcagaagacgggttgtattgggaacagggcgtctccagcgaactgggattcgtagcaagacagattctggtgcccagattcagagcgatcagccgtgggcgggctaatgcagcggagcctttttggaatggtggagacacaaggctcgaatgaatgacgttgggatgataatgcaatatgtcaagttgagtttgaacttgactttgtgatccagagtttaagagtgtacttgatgtttagagaggctggtgtccacagtgaaagtgacattcgacggtcacggggtacgatttatgcctcaggcaatgaatgttgatgcctggaatatgagcaatggtcggctaacgatctctctatttttgaccattggaactaaatagccctaataataatatcagacatgccattttcctttctatgatgtagctagatgtgaaataatggaaaataatgcaggaaaaccgtagaatattgggaaatatggtcaaaaagctatgcgcaatataaaacgatttcaagtacggagtagtccgtacgacatgtgacaatcgatagacgcctataccattttcctactcatagcaactagccgaggtcattaccccatgcaggcatcacatctcttaccgctatattaacacaggaagagcgctttggtcccgtcgttgggctcaggtgctggggagaacgccacgcacagaagaccaaagcccctcggcaaggatgccgaagggagcacggaaacttcttcccaagcaagatcgcactttgttgtacatatttactccgtaggtaaccatgtattttccaatcgcttggcacttatgtattgcttggcgatcagtacccacaaaccagactcggggagatgggcacacgcttcctatgtatgtagatgagatagggaattggagatccttcctaactcgacgtgtcaggaacagtcaagcgacacatcagtatctcggatgaaagggtaaattgctaaacgaccctatttatagtcaatcggtgcaggtgctagcgatccccactagactagacaacatgctcgtaaaggcatgcagcgtgttggatcagcaggggataagaaagcattgttaaatctgagtagtatgatcgaagcccctacaatctcgggaatattggcacaaggcaaccgcttggcgcaaggtttttggattacgattctagagtactttgtccacttactccgtagctacggtatgatggcttgcaggtgtctggcagttccaaggggcatgtttcaacggattgagttgtgaggcttgaaacctagccagtctacctcatagcggcacgaacagattcatatgggcataaacaacatagtacatacctagcttacctctcaagttcaaacacctgcgcagtcgtaagtcggaattcaaatctccggctctatcatccctatagcattataataggccaatgataggaaaacaaatccgcattccaaatcaagacctaatgcgccaaaatactccgtcgttggtttcgatactgtatctgcatggccgctctgcagatcagtccatttcgactccgtcgtctccaccggcctgggttatttgaagttgggcctccacctttgcactctatttacgcacggagtagatacggagtaggcagtgcgccacacctggacagacccagtgtggcttttttatgaacccttatgtgtaggcacatcgtttcgttagtcacagatcggcagtcgcaagctgaccagaggcattattattgctagtgtgtggccgtcgcagcagggtcttcccatccccaagtccccgtagaaaaatccacccttcttcgattccccttgtggcccactccggtatagaactggaggcaaaactggacaagcttgccaaccgtacaatccggggccagccgttgggtccatctatagggtatttcatcctgtttccgtggccaatgaccttgacagagctgaccctagccagggcgcggaaaacatgtccaggcgatcgccagaggaaccagagtatgcccattatgctatgatctacatagatagcgatggcaatctgtgccaaagggcctccgattccatttcagagagccgccagactatcctctcccctagggtcaccagtgaattcctccgagcggtggcgatgtcgagagaagcccaggcaacccgatgtcaaggcaagtgctcttttgaccccacatgaatgtcctattgacgtagaacagtttctcccgaggtcccggtgcggtctagcgggcccccgtttaacaaccacagctctgccccgtcgcagggggagcccgtggcttatagtggaatgtgcctgagtagccaacagcggatacaagttcctgtgcaatcagagtctacatttcacccgaccatgtggccaaccgaatcctggcctgtacaagcctcacagcccaagaagaactttgcaggtcggaacctcaccttggctgcacaccagaaagccttaatctctgtaaaagagagaggtctgttgcgtctctactatgagaaaatcttccaaaacctgcaacaaacaaactgtcgaataatagccaaggcctacatcaaattagtcgagccgcgcaagcaggtgaactatccatacaatggacggaagattgtcgaaggcagaactcaacagcttgacccagaggcaactaagccaccgtggtggccgcgtggagtgagccatagggagccggatcatcttccaaaagttggtaagacacaaatatcattccggatgtcctaccaagctgataggagtcagaacgcattcgacttttggtatacatgctctgcgagatgcgcgaatcgcatggaatcacaaccgccagattaaaacaatgcgatcagcccatccgtcgtcagatcctgccggtcgagcggctacaaatcctggatgaggcatatcgagttcgcgaggaagaggaaaaattcctggatggaatttcaggtacatactccctcgcattactcctcaatccccttctcacatgtatctagagggaaaacaagtgtgcatagctcgcaccaatcttcctcatatggcagaggacacatccagcgaacaaagctcgccaaccgaacccgtctcttcccagaatatcgagtccgagtgcagcgacggcatcttcggaatcgatataaccaaagtcaccaccggagacctgccgagcgcgtcagcgtacaatccccccaatccttatagcccgatgcacctgggcgccagcagccaataccattccgtcagcccctccaacatgtcaacatcaccattggaattgaggccaaagcacgaatcactgtctgccgggactcatttgattgatcggacgcgctccatcagcatggcccactacccatatcccggcgtttctggcattcaatcggccccgatggacttttacggtacccctaatatgccccaggatgcaggtgttccaatcactcagacatcgacggaaaacttgtcaacagagtcaatgatgccatacggccacccttattatttcaactattgagcgtctaagcatggaccggagcatggaggatatctttttacgataatgaatttcgttcgggttgtattggaacaagacagctctgtccgaataattatttacgagtaagcccgaggcgatgcctctaaagatcaccagttgaacctgtaaccgatgagccgagttaaaatccagggatagatacaaaaagatgggtagaggccggcctttttcccattcgattgccctgatatgcctataggcactgcgagtaccagtcattggagtatttacaggttccacttgtgcaagttgtgcttccagtccagcccaacccaccacactgaccatagagagggacaccagtagtgctaccagagctggtagtcgtggtggtagcagaggtagtcgtggtggtagcagaggtagtcgtggtggtagcagaggtagtcgtgctggtaacggtagccgtagaggaagtggaagtaccagaagctgtaccacccaaagcagccaagataccatcataagccggcttcttcaccagattcgcatcccaaggacacgcagcaccctgaccagagaatgtactaggaacccacgagtacttgtccgtgtagtcccaaatagtaacgcccacacacttagcatttgccacacaagccgcaacggtgttctggtaatcggtcgactgctgcgcaagcagggccgaagtcgacgggagagtcatccggatatcaagctcagtataggcaacttcgacgcccagggccgtgaacgcggccagattggtagtctgcgcgctctggctaggggtacttccgacgataaaatgtgcttgtagaccgacaccgtcaatcttggcgccgtactgctgtaccagcttgacgattctctgggcacctgttgccttggacccggcggattcgatgttgtagtcgttgtagtagagcttggcgtctgggtctgcggcggctgctgtagcgaatgcgatgggaaggtatgcctcgccgatgtattggtagaagacgttgtcacggtaggtgccgtcctcgttgagagctagtagtccataaattaagcgacttgtgatgatatgattcgttcctagttcggcactgaccttcgttggcaacatcccaagcatagcatttgcctttgtagtgagtcaccacgttggtgatgtggttcttcatggcggcaagcagagtcgcgttcgtccaggagccgcttgagactggttatcattagatggatattcccgcattgaaagacacgagataacagaacttaccccagctgggcaactggctataccaaactagagtatggcatcgcagcttttggccattcgtagcagcgaggttggcaatgacatctcctttggtataggaaaaggtgttctgagacggttcggttgcatcccactagcgacgattagcgatgtttgaatattacgctaagaccagcccaaccttctgcgcattaccgggtgtaatctgtccaaagtcgtctgtgttgctcagctgggcaaggtatgcggtatccgtcaactcggagttatcagtagctgatccgaagtatagctttccctttgcgacagcagcggtgttcaatccggatgcattggtcctattgagaatgggcattagtcactatcaactgccaccgtgctgggaattggaagatcaaccatacagctgaggaagaacactggccagtgccagggcaatagtggagaagtgaaccatgacgaggtaatcaacgccaataatgaattgaccgcaagttctggacctggagagagaaatcgaagggtcgagctccttttattaccagagataaacagcgtcaaattggccgggtcttggaggttttcaggacctccggcgctaggtttcacattagaccaccttgtcaactcgaacgggccgaaaggccgtggcatagttgccgcggccgtttcaaacagtcaaatgggcttggccattgctgagatgctggatgagcatgagttatgcacggaattcgttactttagcccgggaaactgacacgggacccgacgccacatagtgggcaggggagagaaacgaatagggagacggcggagcaaattccgtatttccttcacggcaaaaaggggcttttttccatattcttggagggaagaggagaccgggtaaatgcgattttctacaaatccgggggatcttcaaggctgtcgatcaattcttcttctcttctccgggtaaatcttgactactaacctaaaagtgcgaatagtcagatcagaatcagcttgataattcaggctgagcaggtttccccattgcgcattcaggtcagacacgattcaaacaatggctacgatcgacctgttggattgcaaccttggaaagaccttttgcttagaaagggggcgttgccgcctcaatgatatctataagatctgaaaatgcatatatacacacaagactggcgcttttgaggggtatcagagattttataacgtcatgttgctccgtggtcggaccagagctgagcgttgcgagtggtgaggcactgttccagccaaacccagaccaacaggtcgataggcaggaagcagcgctcccatgggtgtgatgactttatggacgcagattccatagaaatcaacggatcggttgaaagttgagtggtaggtttcatattagtgagatactactcagccagtcttccgagccttcatctctgcaatgtatttcccggtcttggagataggcacgacgtggatggtgacaagctcatccacaacctcgaccttgccaccagagagaatctgcaataaaggcagcttcttgccagccttgatcaaaccaccggagacagtctgcatgaagcattcaacaccttcgacggtgtactccttcttcttgtcccaaggaagggggaagatgtaactcaggtggtcctcgatagcgttcatctcagaaaatgccttgacaaagtctgactgggcgtccatggggtaaaggaaaacgaccgggaactcgattgtgctctcgggtgaaaggggatcagggacgaggcggatcccggcatcttctatatcaggaggttgagcggttttgcgagttctgatctgacgggcgcgcagagctgcgctgagaaccatattctgcttgcgcaccctttcttcttcggccttcttcctcgcggcagcacgctccaatagggccttgcgctcggcaatctttttggcagattctagaagagctttactttctgggtcaattgccaatcctcgggctgcagaatcttccgcctcggccactttgtccaacttgaggagtgccaaggaggagcgatagaaggccttcacgtttttggggtttaacttgagggtggaagcgcaatcgagggtacaggaacggtagtttcctgcaaatgatattagtcaatgtgccatgcaaccaagaggataagacatgcctaattccaagttgcacaatgcccggttgatatacgacgcctcttccaacttgcgcaacagcgccgcctcttcctcgggatcttcgggcgcttcccacttatcctccttggcattaatgacagcaagagcctttgtgtagaactctttggcgtcaatccacttgagtccctgcacagcttcatttccttgtcctttgaagctattcgcaacctcccccctggtaccttcgttttgtagagcctgaagagcatccaagagcacgttttcaccctctatgaacccatatatgttagccgaatcgaacaaccatgttcaaggaatggttggacgtactctcgtcacccgctttgtcaatatcggtcatgaacagaggcgtcttattcatcattgccatcaactcctctgacgaatgcgactgaatggctgcaatagccggcggaagttctggtgcattgggatcggtattgcgcgccttcagtgcttcctcgttgatcgggaagggagtttcgtttgcagcgaaggcgtcaaacccgggcacgggtacgccctgggtaacctcaggaggcgccttgttgaggttgagcgactcatcaaagtcatctggaagttcttcgacgcgcgacatcttgagcgttggtcacaagaaaatgttgcgcttaatttggtgatcgtccaatgcttagaaactatgcccgcgatgcaaacagtgcaaacaggaggggtttgatcagccctaagccctattaccggattagtcggactggaatgggatgcaagaatatcaaacttgcgaagaagaagaaaacaaaaagatgataggaagattttgggtttacaatcaggatattccgtgatgcactgggtgtttctaggtcgatgaccgcacgtggagagggcctgaggccgccattcttcatactctatcaatctatcaatttgctgctgttgggttatatttcatgatctatatacttgattcactattggctggttctatcggagttttctcatagcggggaacaaggcatataccacaccgtttgatgcatgaggaactagtatactaggcaatgactacaacccaggcagtgtcggacacctactatacaggcctgatcgtgtgtactaatccccgcaactgacagcctgcagaaagttaaagcaaccctccttattccggcgacaaacctccgcacctcggaggccatgtcatcggtgaaaccccgaccagaacaaaccccgcatcaatcgggttgaagaccgaaccgattcaggccgtataagtccaggtgctaggttacgagaataatctgatctaccccagatattttcatgtaataacatacaccacatcaccatggccaaaaacttcaacatcctcatcctacccggcgatggcatcggccctgagatcatggccgaagccgtgaaggtcctcaagttctttgagactccccagcgcaagttcgaactgcgccaggagttgattggaggttgcagcattgacgctcatggcaagtctgtgaccgaagaagtcaagcaggcagctctggactcagatgcagtgctcttcgccgcagttgggggcccgaaatgggacaatcaacgtcgtggtcttgatgggcccgaaggaggactactccaagtccgaaaggctatggatatatatgcaaacttacgcccgtgctcttccacctcgccaagtgcctctatcgccaaggagttcagcccgttcaagcaggaggttattgaaggtgttgattttgttgttgtgcgggagaactgcggaggtgcctattttggccgcaaggtcgaagaagaaacatacggtgggttgcactgagattatattgtcattgaatagctaacttttcttctaccacagcaatggatgaatggggttactccgaagccgagatccagcgaatcactcgtctatccgccgaagtagcactgcgacacaatcccccttggcctgtgatctcactagacaaggcgaatgtactagcttcttcgcgactctggcgccgggtagtggaaaagactatggcggccgaatacccgcaagtgaaattggtgcaccagcttgccgactccgcgtcattgattctggcaacgaacccgcgatccctgaatggcgttatcctggccgacaacaccttcggcgacatgatctctgatcaagctgggtcgattgtgggtacgctgggtgtattgccaagtgccagtctcaacggtctgcctggtgataagacactgaagacacgaccttacgggctgtacgagcctacacatggatctgctccgacgtaagtgctagaaatatgataagaaagctgttctgactttgttatagtattgcgggacaaaacattgccaacccggttgcaatgatcctctgcgtcgcgcttatgttccgatactctttgagcatggaagatgaggctcgacgtgtggaggatgcggtgcgtaaagtgttggattcagggattcggacgcctgaccttgggggcaaggctgggactaacgaagtgggcgatgcgattgtgtctgcactatagtataagatatgggaatgactatccatgattgtttggtcaaacaaagtctaagcatgtgtcaaactggctgatcaatgaatgcaaatcacctctaactttgataaagatagaagctgaccaaaggcaatgtttgttagatactggcgttgaaaggaaattagatagtactttccatgattccataatgcttaggtataataattagattggtatgttcctagatatttctcattcttcttctcttcttattcctctccatgtctaataccatcacttccacacccccacagagtccgctccaaggcgagtctcccacaagaaacggagtactcaacatgtcacccccaacgcctaccactccattgacaccaccgatggcaccccaccatccaagccagcatcaaaacacaccaggatcctgtgctctacgcctcgaaaacctggcacaacaaacctccaccgcaaaaagcgagctgatgacatccgtcgcggcagacatctgcgcaacattcataagcatcgcaaagtattccgaggaaggcacacttcaagcgcgacacaccgacgtgatcgacaaggtgattcagacgattcgcgataccgacgtgaagcagcgacgcttgctggatcgacaggtgcaacgactgcgcaaggagaggaagtggatccggaagaagtattcgcggctggctgtgcaggcggatgggctgggtcgcgcctaccagatgaagatgcggaaattgagaatctcactacaagaggcgcagggggaggtggtgcgtctacgaattgagcgggatatgttgcgagattgctttaagaagtacgatattgaggacagttattcgaatgacaatgacaatgtcgacggggagtgtgaggttgacacgggggaggatgttgatggagaatatgagagtgcagaagagactgtcaagggggcagacctttgatacctctcagatgtcttccaaggcgtctctgggatgtctctcggagattatttgtccgtttgagcttgcatgcgaaaccgttttcatatttcctttgtctggccctgggttttaggggagaagagatctgcctcctatttcgaaaaatgacgccacggcgaagacaatcatgttcattctgagacttggcttcgtcaattttcccacatgacagcagtacaaaatcaagaagcaagttctatcaaaaaagactctcatttcaactgcgtttgaaaataccacagtaatggatgtaagcatcggatttgcctatcaatattagtgtcatatctcaatatcggcttctgagttccgagggttggatccgcatttgatgacatctggaatgtgattctatatcctccagggcttgttccagttgaatataagacgacaatcactggaaatgggaatctcgaccatcagaaccgagagaaccagacgtcggaacttgcaaatcgaaatcacagccgatcatgagcaagtcaacggtcgtccaaatcctacctcggcatcttcaataggcgcaccctgattcggcccgcggatccaccgacttccatgtggaaagtccggggggctctttttttctgttcgtttctccttcttttcggttctttttctcttttctctccctgatcaaaatcctcttacttaaaactcttcgaatcacctcgaagacgacgttgagtttgtccaatttcttcccgataaacataccccggaccgcgttatcggccgatacccagaatgagcacccacgactatgacgccgtccgcaaggacatcgccgatatcctgcagaagcccggctatgatgatggcagcgcaggacccgtcttcgtgcggctagcatggtaagtaaatgtgatcaagcctcatcgtttcccggtcggggacctcggctcatcggggacgataagcctcgcaatcttactgacaatgatttcaaacaggcactcatctggcacgtacgatgttgaatccgacaccggtggctcaaacggagccggcatgcggtacgaagcagagggtggcgatcccgccaacgctggtctgcagcacggacgggcattcctagagccgattaaagagaagcacccctggatcacatactcggatctctggacgttggccggagtagtggcgatcaaggagctgggcggaccggatatcccctggcaaggtggacgaacagatttgataaacgacaccaagctgcctccacgaggacgtctgccagatggagcccaaggtgccgaccacctgcggttcatcttctaccgcatgggattcaacgaccaggagattgtagcgctgacgggcggacacaacctgggccgatgccacggcgaccgcagtggattcgagggcccgtgggttacgaacccaaccagattctcaaactctttcttcaaattgctgctccagcttgactggcaacctcgcaaggtggcgtcgggtaatacccagtttgtgtacgtggaccccgatgcggatgaggacgaggagccgttgatgatgctgcccactgatatggcgctcatgacggatcctgaatttgccccgtgggttaagcggtacgccaaggataaggagttgttctttgatcacttctccaaggtgtttgccaagttgattgaactgggcatccggcgtgatgctcagggtgccgtgaccaacactgacggcactctcggtggatatgtgtcagcgccgaagaagagcaacactgccacaggcccgcccagggcacgtctgtagggttttattttttggctttgtttttggcttgtttttgatcaattccccactgcgttggttgatccgggactgcagactgcaggattcggatgtgtaaatagatcctagatcatagaatgtgatgaagataactgatggatgcctgttgatatgtatcgtcgtagtatcttcgtagtggaattataaggatgaaatagaaagaagagagaaaggggaatgttgaagtctggggtaagattgcggggaagcccacacggctatatctgaataatactacatatacagactggtatgggcatatacgatgtagacttattattatgtagtaaagaagtacttatgactgtaaaaaggcactagaaaggtaccaagcgtgtaatatctcgtgttatacaaagtcgggcctcgggtatatcaaatgagagcccgctgattggcagatgccgtgttgactagtatcaacggtgtatattaggaaatataaaagaacaaaagagtacaataagtcacataaatcacataaatcacataaatcaaggcaaatctgcatcatctgcatcactgtcaccaggcttccatgttggatcggtgttcttcttcctcgaattcctcaatcctggtcttcttgataccttcggcctctcctctcgctgtttcttctgttcttccttttctctttgctgtttatactgttcctctttagtccacctcgagcctttctcccgtaattcaccttcattttgttgttttttctttggatcgagctctttctgctcttgctttttccgtccctctcttctttttcgatcgtggccctgtttcttttgcatattctctcgatcgagttcctcctcttcttcctcgtcttctacgtcactaaatctctggcttgagttgaattcacctgcacgtaggacctgcttctcccttggactcagggcctgcttcgaaatagcgtagtttgtcatcgccgacctcttgagctcattaccgtgagtaatgcggaaatgtcgatttcgaagctcaggaatagtctccgcatctggcatgctaatatctgacgacccagtgcccctgcgattgcccagctggggtgacataggcagatcagggaagtccaaagctccttcctcactaggtagacccgaaggccacatgtcaggatgttgaagccagcgtggactctgcatcatcgactggaatatatggttcttgggatccacattcattatgccttgaccattgctcgataggtcatgaaggcctgtcatgtccataaacgaggacaactcgaactccggagctgtggtggtggaataaaggtccggatcaaggagtgattggtcgatgaccaatggatcaagaagcgccgaatcaatgtgaccaagtggcagagcggatatggcagtctctccggcggctgggttgggggatacttttgctgttgcccagccgggattgaaattgctgaagcgctcaccattgtatgatagtatacgaggccatgactcccgctgcggtggaggatccgatcgctcccaagggatgtgttcttcgaaaacgctcttgttctcgctcacgcaattggccatctctatcaacgtgttgttggccttgtgcaaaagttcgatggtgggattcatgattcgctcgtagaaaaggagcggaatggcataatgattgacccattcagtgggcactttttcgtcaggctgaaatgctgggattccaccgatgagaaccccagagttgacttggctgtcgtacatcataatattcccattatctttctcgcctcgtttcgtatctgtccagaataaacgagcatgggattcgttgttatagattccaccaatccaacgatagtgtgcaacctgtggcttgtcttcatagtctatgtaattgaatttgagattctctgtgtgatttcggattcgagtcttgatatcagaggttaccacaagacgcagagggagttgaccgatctttcgttctccagtaactcccgtcggatcaccacacttatcacacttgaaagatttgcgtgggtagaaacatcgctcgatcaactcttgcaactctactcctttttcatcgcccgtttggtagccaggtagaatgcaggacccttggtgggagttgtagaatggcattgcacactggcatttgcaaggggtcactcgttccacgtggaaatagcggaattgagcaaagcttctcgtggccactgaccataccgcccaaggaggaatcggttgtcccattttcaagccggttgagctgtcggaaaacatacggagccactcgtcacgcacaaatatagaagttttatcgtcgaaggtctcccaactcgccattgtcacttcgatgaatgctttttcgatatctttgaactcagctgctcgattgtttgcacgatctatcttggtacagccagcatcgagtagcattcccgctacaataacagcatctgttgcacaagacattgaatcccagatagggccgcggccccggaccggatatatagtgccattcggatcccaatcaaaggtcaatggggacaacttgacacttgccgtggtggggaatgacccaagtttcatcgtgagcatatccttgtaagaataggctgtcccgtggcgaataggtttcccagtagacggaatgctgggatcacggtccaaatctgcatacacgatctgcatcacagttcgttccatggcgtctgtaatcgcttgcgtgtcaagcgggatggaagctttcgggacaatggggctcagttggtgccttccaattggggtcactttatcggaaggtgccagagcaggcgtccaggtgaaagttgtgatttcatcagcagcaaagacaggctcttggtatgccgaagtggggtaatgaaagtgatctctgtaagcaggagcaccgggtgaaatttgtcttgcgcgcttgctacggggttcctcgttgtcctctgcactccgtttttggcctggtgcagggcccggtatcttctgactcggcgcttcggtcaatgaataggccggtgtaatctcgactcctgggttcatgtgttgcaacaagctcatgcgaaggatctcctcctgttgcacagcgagtgttgacgctggagatggtggaggtggtgtgtgtaagctgtcgacggagtacataaactgttgaataagatagtcgggcatatctggtggcgcatcctgagggcgtatgtatgcattcaagataactgtgttcacatccgggagagaattgtaccacctactgaatggctttgggcgcggatcgaggtcgtatctcaagagtcgtggcccagtatctcggttaacatcgagcatatctgcccaagtcttcggacgatggcgttcttgcatgtagtagatgagcttgaacaaaaacatatgttgaagcttgacatttgacttctttctcattgtcatgggagtcttagtcggttcctcatagtggattccccagaagtaatgcttcatcaacacttgcacctgcggggccttcaaggaacgactggaaccatgtgcaacagatgaaaacttggtattgaaatgtgaccagtcgtcgggtgggttaggaaggcgtgtaaagtcgtaaagtggtaagggtggaggcggctgttcgagctcctgcggcctcaatgggaaatcggaaaagagaggaatctcgagcggggagaaattactcatctcgacaatctgaaagtgaagaatcaaagtctgaaaagtataccacgacgggctcaatcgagagcaatatcctgatattggggtgtcctatattggtctgaggaatttggaaactatcaactagaggccaaaacgaggaaaaccaagtgctttaatggacaacgaggaacatccattgtccaatgtgccggcatgaatgccatatttatcaaggaaagaaatagagtgccatattgtagacggtaagcatgagatgaaagaacacatcgagcctctccccgaatcgaaaacccatggtaacatcctctttcttgatgaacaaagcacttagaatcgaggcaagagttagcaccagggcagcatgagagtggggaattctatatttgtcacactagcacatagcgtcttggtcgaggtcaatcaaagaacctagtaaaaatagaaagtaatactattaatggcagtgggattatggggatctcttaacaaaccaaagaacataacttatcaaatcgaagatcctatagattggggttccagatccagtgcaggtaatggatgttgtggcatgttgatctcttgtttggccttgagtaaacctcactgggtctagaaataaccatcaaagtgcagaagtgattagtatcgagctagagatatcgaacttcataaagcaagtgaatcggagcttctggcatcgtccgccacgaataaagatatgagctaaagcatgtacgggcctgcgggtagccaatccatagacttaagaaacgcgaaataaaaacttaaatcaaagagatgacagtgccacaaagtaaaccaatgtatgaacctcatgaagggttactcgaagcacaaagagacactttgacagtggctgatcactccaggaattgggttcgtcactgtttcatgtcgaggaaaacaaagccgtctggtcagggctgcaggtaaaatacgtgtaaataacacggcagattacccgaatgtaacaccgaaattaacagtcatgtgactgcacatgatctacattacgcactagccatattgggcctagtcccgaacaagcgagccctcgtccaaatcgggttagtgctccaattacccgatcccacaagcaaagtcactcagttggacttcctctctccatccctctgtcgacaacccatcgcgatcctcgcccatcgcccatcatgtgtacgtgacgaccccttctttcagtccgagagcattatatgatatacaaccacgaaattgccaaaaaaaagaaatgctggaaacgactgcagagatggcagttctcgaaattgaatgttggctaacatggcggtttctcgataacagcgctcgtgaccggcgataagacgaacttccagttcatcttgcgtctgctcaacaccaatgttgacggcaagcagaagatcatgtacgcgctgacccagatcaagggtgtcggtcgccgttactccaacctggtctgcaagaaggccgatgtcgacctcaccaagcggtacgttcgccacaatccctatcgaatattcaatcattcccatgcatcatctgttattggagggaaaactcgaaagagacaatggaacagtctggaccggaatcgacctgcggactaaaaagagggggaatatcgcacaacaaacaaattttctacaagaccagcaaagctgacaaaacgccttctatagtgctggtgagctcaccaccgaagagctcgagcgcatcgtgaccatcctccagacccctacccagtacaagatcccttcgtggttcctcaacagacagcgcgacatcaccgatggcaaggacacccaggttgtttccaacggtctcgactccaagctccgtgaggatctcgagcgcctcaagaagatccgctcccaccgtggtctgcgtcactactggggcctccgtgtccgtggtcaacacaccaagaccactggccgccgcggtcgcaccgtcggtgtcagcaagaagaagggctaaatcattctgttcgcttttttgccgggggttcttggagggattccgttatttccggtgtgtttctatggacactcgtgggaccttttccccgctgtcaaaaaattgaaaatgaactataccaatgaaatgaaccgatcttttcaatacgtatgctttgcttttagccctgggtttgatgggtcatactttgtggaacaatttgccaactccatgatcctggctcaatcctcggccctcgtagggtagaatatcttgcaagcctccgtggtataattcgaagaatacctttctgtgggggtagaaagtcctagaccgtcggtgtgcctgagccataggtcaacaactatggggttctggggttatacctgcactcatgcatcatccatgcctacactacatgtttattactcaatgtttgagtctatccaaaatttattgaattcaaagttgcctagttatataccaaacaaaagccaaatcggtaggaaaacatagtatgcggccttctgaatttcccagagggttaggtgtcaaattgtacgcaaacagccagtggcaagatcaataacacgtagtgtaatgataagttcatcaacgcattgtatcatatagcagctcggttgagtgtttagaaccactcaccaccgagccagcggttgaagaaatcgatactagcctcaggctggtccatgggaaccatgtggccagcaccgaagatacgcatgaaggtgaagttgccatgggacttgatctgaccgatattcttgccaacgtgctcgttctgtacaatcttgaggtcctcaagcttggcggcagcgaactccttctggccaggccactcaagagcctcggaccaggccttgttgccaagccagttgcagatgaagtcagcatcaccagcgtagatcagaacagggatctgctcaaggagaccgggcacgaggcggtggtaaggcttgaaccaatcgccgttgaagaggaagttacggttaatgtcgaagttgcatgagtcgtagccatcgacctcagcaccgacggcctcacgcacgctctcctgaccgaggtactcgctgacgtagcccatacccttgtagcacaggttgctctcgtcctcacacttgccgcgaatatcgtaaacattctggccggtgcgctggtagggaccaagcatggcgttgttgcagtagatggaggccgggacacaaacccaggggctctcgctgttgtagcaggactgaatcatgctttggcagcgggccagggagttatccatggactggcaggtgctctcatccagaacagcggggtagccaccctcgccgcatgccatagggcggtagtactcgtactgagtaagaccgtcggtgagaccgttaccaatgagaacagacttgaggttgatgttacgcttcttgtgggagagaatctccgaagccatgacaggaatatagtggccagcgtaagattcgccagcaatgtggaagtcctgtacagcgtactcggggaattgcttgaagaacaatgtgaggagggcatagacgtccttgccagcagcaacagtgtcactgacagaggagccactgtaggagtagccgacattgatgggctggtccaggaagatcacagaggcattgttgttccacgagaaatcattgtaaataggcttgatatcagcaccgatagagctgggtccaagttccaagaaaagtccggtgagagacgagcagccgggaccgccgttcagccacagaataacggggtcgttcttggggtcattgcgagactcgaagaaccctttcggaggttagatcaactttagatgatgaatggaggctttccgaacttacagtagaacaagtgcttgtcattctcgttgtcatccaggtaaccactgtactgcttcacaccggggtcgatgccgagagcgctggggtcaaccttcttggcacggaggctgtagtcctccagcttgccctcaacctcacgctccttgacgccctcggcattagagacccagatgtcttggacttcagcgccactgacatggtaatcccagtgcgagtcagggcggcgggtgtgcttcttgggcagggaaagcaagggagcgctctccatggactcggggaagtagttagacacttcctcccagagctgacgagcctcaccagaaagagacttgaactggtcctggaggtgctgcaggggcttgagtgcatccgcaccctgttgggctacgttctccgcatactccctgtgagctccgaggacctgctggaagggcggagcagcggccgaagcagctcccaccaagagagtggcggacaggactctcattgtgtactgtgtttggatttcacagcaagaatgatggtaatgagctggtgatgatgaacgggtaccttggggtctggagttaggcacctcttatcagtaaccgttgggagaatggctctcaaaatgagccaaaggaagttgatcacttacaatttgaagataccacaagatgattgataattgagacaaagttgaagggttggaagaagcaagacggtgatgccttggggcttgtgagatgaggagaagcaggtcccttggccgatgacgccggggacagtcgataagacgagagggctgggccaatcagatgaccccaggaagctgcccgaccccatgacccggatgagtcagcgtgagtcacgggattccaaggctacgaggggcacgagcttttcgactaagcctttttgggtaaattgcctgacgcaaatcaacttttgatacttcggactcagtctacatatatccttcgatcttgacggtgccatccacttggaaacagtattcaaaaatatatcttgaatcttactacattttctggtgtctgttttttctcttactgaagcaaccagccctcagcggctttcacacccaaaatgcctatcaaccaaccctccaaccagatcaaattcaccaatgtatcggtggtccgactaaagaagggtacacttctatcttacctatgttccttggacgtttctaaccttttatcctaatccaggcaagaagcgctttgaactcgcctgttacaagaacaaactgctggaataccgatccggcgccgaaaaagatctcgacaatgtcctccaagtcccaaccgtgttcctctccgtctccaaagcacaaacagccccaacagcagagctagcaaaggccttcgggaccggtaccccacgagaggaaatcctccaagagatcctccgtaaaggcgaagtgcaagtcggcgagcgtgagcgcaaagacatcctcgagcgagtggagaaggaagtgctggatatcgtgtcaggtcgactagtcgacccctcaaccaagcgcgtgtacacctctggaatgatccacaaagcgttggatcaattaacctcggccagcggacaacaacaggcacattcgagcggggaggtgaatggagatggcgaggagaaaccctctcagccgaagaagccgctctggacgggagtttcggcgaaccgctcggcgaagagtcaagcgttggatgccatgaaggctctcatcgcctggcagccgatccccgttatgcgagcccgcatgcgtcttcgtgtgacatgtccagtgtccctgctgaagcagtctgtcaaggctgccccaggtgcagcatcgaataaggagaaggaagccccatctggtggctcaaagaacaacaagaaagggaataagggatcgaagaaatctaagaaggacgattcagatattgaggctggtcagtctgatgtggaagcacccaaggccccgggcaccgtcaaggacaaaatcatggcgttcatcgaatcagttgaatcgcaagaagtcattggcggggatgagtgggaaattgttgggtttgctgaacccggtgcgttcaagggattgaacgagttggtgagcaatgagacccgcggaagaggccgggttgaggttctggacatgtcggtcacacatgaggattgaattatgacgtttgatttctctaaggctttactgtacatgatacgatatgactgatgacaaaaagtaaaaagaaccttgaaatatactggatttgatatgccatcacattctgccgcagtaaggggaatacaatgccgatgaccaaagtcttttctcacggaaaaagcaaagatgaagaaatgacagtcgaacaatggagacatactgcggggaaggaacacatactgcagctgccagcagctcgtaaaaacagccactcaacgtaggagagtatctttgcaaaaagaaagaaaagggccaggatctcaagtatgatagctcaaagtataatcaacagccctgaagcggcgtatcattgactcgcaacaagaaattaagtaacaatatgatacaagaacacgtctaggatatagacaaaggagagtagaaaccccaacaccgtgagaattgcttattcccaacaaaaagaaaaaagcaatcactgatcatcgcaacgttcgagccaatcagacatccccaggtacgccgatcttgtcacatccagtcaccagtaaaaccacattcttgcccgggccaagttcgctagcgagatccagtgtcttggctactgcatgactcgagtcaagaccgggcaaaatgccctcgtggtgctgaaggattctaaacccatccagggcaaccgcgtccgtagcagttgagatttcaatccggccagagtccttccaatgggcgacctcggggcccacagtagacaagttcatgtcaggtgaaatggaatgcgaatcaagtatttggccatcgtcgttttggagcaggagagtgcgggcaccttgtagtaccccaagtcctccatctgtcagggtagctgccttcgcggcttccacaccaatcagacgaatatatgagtcatggaggaacggtctgaagagaccgattgcaccgctaccactgccgacggcggtgacgagggcatctgggtgacaacctactgcctcgtgcatttgggctgcaacctcctcgcctagaagggcttggaacgtgcgagccagagtcggcaggggactaggccccaccgggctacccatgaggtaatatgcagattcgtgattgcagaccgcataccgcagggcttctgtgatggctgcgcgtagactacccatgccggagggggtgcgggccgtcaggaccttggcaccgagcgatttcatctcgagcacgtcctcttcctgggcactagcgtcgtctgcaccaatgacaaccacacatcgtaatcccagacgcgcgcacattgcagcagtgaatttgccatgcttggccgaggcacaatctgtgacgatctcagagcggcccatccggcgagctagcaggacctggccaattatgttgcgggttttgtgactaccatattcatttttgtcctcacgcttcagccagatagtagcacctcctgctaaattggtcaagttcccagccatgtgcagtggtgtggcatgagcacgttgaaacgtggcatattcttcccagaacgaagggtctgagacagcggcctcgaagaatgatgtcagctcgtataggaatcccattatggattcaggagcaaaccggcccccgtaggagccatagccatcaaaggtgatctgcggggcccgcagagtgccatctgactgcaggatgggggtatacgctgtgattgtgttcaatctcgatgtggagatagacttggcaggtgtatcggggagcgtggatgtggttccggtgacagttgatactgtcgttgctctggtttcgctatctgaggcatttgtcgactcggtttgtgtgctactatcacaactcgagggggaaaccgaacggtttctggactgtacactgctaaccccttccgggcagggattagcaattcgtgcttgagcaatcgttctgccagcaggtctcaagtgaatgagatcttccacattgtccgtgccatgtgttgcgagatcagtgggatcagctgatttgggagaggaaaagcaaagaaaacggcgcagagagcgaagcatgttgtgctttacccttcggataaaagtagaagctggattgatgttttagtaagtgattgacaaataatcatagagccataaaaaataaagagaatggatttgaggttcgactattcagatcattcagatagaagttagggcacggtacagtgggcgaaaggtgcattaagtatgcatttagatatagtgtgaacgttcctgccttatgtcgacctttcagctcgtcaggcgaatgaatcggaaagttcgatctcggattgcctttcttggccgactaggttatctgaccggctcttctacttctttcacttatgagtggagtacatatggcccgtattgtgaggttacgtagtggagcggtagaaaagtatgaacaaatataaccgagtgccaatgtcattgaatctattcagatggagtatatagtggaagatttgcctcattcctgtatatcatagaactatgtagactcggagaaaaggtatccatatagttctggttccccgagttaaacagcttcctatttgattgctttgtctgaaagattgctatccagaacttagcaaccaggttaaatactctgtacatacagggtaccgagaacttcaaacatcattccaaataagcaaaatccttctatttgcaatgaaccgcggcagtgccagcagtgtgactcaagcccaacgccaatgatgtgatcaagcctgacctagtatgatcagattccacatcttaatcgaggcgtgcaactgtacagggatgtagctcttaaaagatcaatgaaattggggcctccagggcagaatctcatatatgctgtgttacaacacccgcactcccagaatagtcttgtctgtttcacaaagtgagccttatctcaggtcaaatctaaatccacagcatgtaacattccagacaccgctccacgtgtaccgtttctcggtcctacattcaaatgactcggttcatataaaatgaggcattttacattctatggagtacagggctctgatctaagagacaaagacaaaatttgactacacttacgcccggaactgtccccggacatatgtcttttccccatcgatgagatgctcctatgccctcaattggcatatggatcggattcattcaaagatctctttcagccatatcttccattcaacaacacatccttttggaaatatttcaaagacaagctttcaacttttcagctaggacttcggaaattattgggaaatttactactctcaataaaaatggaatccactagctagtagctttatcgttggcatattgctttttgttctatgtgatccgatcctcgccatcacagcatgccaagcttacgcttattgattgatatcgatggtctaccaaactgaactgattccctagattcctgtactctacattgctcatgtgaataattcatagatcgacctagggcgaagctgatcatgtgatatacttaataggatgaacttcaaccaatgagtactcatcaaagaatttcttttcctttttcttcgttattgctttcttcgttattgctttcttctgatgtattattttatagagagctattggaactagccaaaaataaggttgtagaatttctatggtcggaatgtggattataatgtggatacagggatacttgggacgaatacttctggtacaaactcgaattagcaaaagcttcattaaacagtatgatgtattaatgcaagtcgcattaatacatgtaggtactagaagacactgcatcgaaaccatggactcaaggctcagtatggacaacaagcttcattaatacatatcaaggcctctgcatctacattttagagtgggaaacatggcgaggagagcgaaagcactgaagcattcaagcatatatcatacaggagccaattctcaaattttccattactatttcagtggatcctataacgaagaaaatctgcagttgtattgctacattacaccaaggggaaaagctgatactcaaaggctgatcattgatttgagcgtcaaaagttatacgtcagtcaagcgtcaaagaaacctttctaaccgttgctctctagattcaggatctcgatgagcgtttgatactgccggtcaagagattacgatcgcctgcacccgctccagctcttagactaatgtgttcttggtccaattgtttatcactttgacatgcattttaatcagaaaaaatcgtatattctacctaattcctatatgacttagctcctcaatgataaatcagttgatgatgattcataaagcagttcaaacgtcatatgatacaagtaacttaattttactaggagtttacatagaagttgcaggtatctactgtcttgtatttggagtttgaaacgaaagcggtgtctaaaactgtaaggcggtataggaagcggcagtaggcacaatccaaattaggaaggcggcgactgaattttcaggcaggatgggtcatatcaacacccataatattctatcacctcacctacttcattcgacaatctccacgaaaacggatatcacgaaaacgaatatattcgcggaaacgagcgtgtccgtgaaagtgagcatgcctatgaaaatgaaaatatccgcggtaactgcgtaaccgcgtacgccaacccccagactatataatatgctcttggtctacttctctaccacctcatctgcttcattcgataatgtccgctaaaacgagcatgtctgtgaaaacgagcatgtccgccaaaccgagggtgtccgccaagtgtccgccaaaatgaatatatccgcggcaactgcgtaaccgcgcacgccaacccgcagactataaaatatgttctcagtctacttccctactacttcacctgtttcattcgaaaacgtccgcggaaacgagtacgttcccgagaacgagcatacgcaatgaacaagtccgcgaaaacgaaaacgagcagtgtccgcgaaagaaagcatatccgtgaaaacgagcatatttgcaaaagcaagcaaattcgcgaaaagtggttcccggaagttcatcaccattgtatttcgcggatatcaccccgcgctaaagattatggaccgagcaatcctagccagagcaggaaagcatcctggaaacattccacgcctaactcataggtcggagagagggacgggcgagcaactggtaaattcactggatcctttgttcaaaggagttgctttctatggatattgagtactacaacaacgaccatcgctgcctcggtatgccttgtctcattgtcggaacgtgcgagatgatgctggagtacgcgcaagctcgtccagcaacgtggaggatgatactttggaattgaaataccgatgtcgggattgagagaacagaatgagcaagatggttctgcctttcatcgaggcatctctaacaacacggtctttatgacgcttagattcaaaatcttgtcccagattattcaagtttcaagcatgacgtccttgatcttcctaataacctcacacaagagtagaagcaaacttggaaacattgtctgttttcagcgacgtagatatcgaagtctgtgaatggatccccccgccaccccgatccaggcctgggtgacccgcggtcgacctgtgtagggcaacgaatagggcattgtgtattactctctaagtatttctcattcttagcgtatatatataggattgatctggaatccacaaactgtatgtccagattcaagaatatacggcaacactatagtggtattgtcgagttcctcactctccctgccattcttcggcctattagatggaggacgtgattgggtgcaatcggaatagcatcacaagtgtaactactcgacaacgcacaagtcatccaccatacccactgaaactccatgaaaacccagtcgatacgaatcacgaccagaatagagcgatgtgcgatcttggcgcgggggaaaagcttggctctaggcggggttggaagattcttctcgaacaactgcacgatcttagatctagagcgatccatctcgatcgtgcgttgtacctttttgactttaattgatttacgagagttatagttcaaaaaagcagagaaattgagttctagtaaggttatctccagcagcgttaaaattttctctagaccatctatgagagacattcgcgacgtgtatatcgtgataagagagcaatggctcgcgaagacaggggtggatgggttaaacccacccaaagcaaaaccgacagatcccaccgaaaaagggaaaaaaaaaagcaaaaatcaaaaatcaaacagccaaaatccgtaacgggtatacgcttagatgcaaatgcatgacaggtaaaaaaggaaagacagtcgctgaccgacagtcctcgacatctagtgaggagtgactcggtcgacgatggggttcagggatggagatgcccgatcggcaaagccaaaaaaggtcgagtaaataagagacatcaagtcttgaggaatggaagggatgattcaaaaggaacaatctcctggatatgaagaaagtagggcgatattcaggcgcagacctggatagcgatcagggcacgggcgagatcctctggggcaaaagggaggtccttccgggcggacatgacgcacggggtcatggcaggcgagatagcccggacgagaggtgatgaatagcggacggactccttgaggaagaacttgggctctctgacatcctctgggatctcgtagatggagccctcgttggtgagggtcatcattgagccattgtagctggaggagttgacgatggtggaagactgggagccggagttgggggcgcgtggcgaagattctgcagggacctcaggaagggcatcgactatgagatagaagttagaattaattttttctaatagggctgggtgatttcgattagggctggggatgcgtacctggatcgacattgtccggggacaccgaaaagtcagtatcggaagggccggagtagccgtcagacacttcaaaagtggtacaaggtgagacggagtcgtcgaatgaacgagtccgttcgaccattgcaccctggaaggaccaagcggctaggctcttctggtgggcacgatcgaaaggaccacggaatttggacgggggacactcgtgtcgcctatagtattcgaccttgggctttccatcatttttggatctggagcggaacacccgcttgaccttctcgcggaagttcatattggaagaaaaaaagaattgggaactgggtattcaagatttcaaattcaagaagttcagagatcaatgcgggcggttcctaaggaaaatgcctcagaggtgcataccactcccggattgggaacggacgcggtgggtgtgcaagcacgaatagcgggggttgtgtgagagaaacagtttaaccattctatgaagatatagagacagggaaagggaaagtaaagcaaagggaaaaaaaggaaagtgaaagaggggagagagagggaaatgcgggaattatagtcgcaggcttatctttgccgttgcatccacgttcatgtcccaggtgggatggatgtcccggttccccagaagcgtctcctgtccagatgcggtatattggggggcaatggtccgtacggagtaataatggtggaatccactgtctgtgcgagagacatcattatctgctaattggtttggtacggggtattctatattcgaatgttctatatagttagggggatgttgtactccgtacacaactagttactccatactctaggtaagcgatttaatccccgattaattggtccgagaaatagccgagtctgggctgcgattctgcgaatgtcacggttactgctacactttagggctacccagcatacttacttctgacccccggtgtatatccccatggatgtatgtcgtaaatcaagtataatggaactggtcattccttgaagtcagtggcgtatattgtactgcagcgaaggcttccagaactcggtgagagcctcacggttacatcatgttacattttgcatgttgtaagaggatgtgtcatggaatctcaactgggcgcaggaataaaccggaatcggagtggagatgaacttgcgcagttgcccccactcggcacgtttttgccgggcttgcctgggaggcagcgctggctcataaagcacattaatttccatttcacaacgaggccggctggcccaatggcaaggcgcttgactacgaatcaagagattgcaggttcgatccctgcgtcggtcagtttttttcttttgttcaatttatatattttgtataacgtagttagataactagttaaacagtctgtttctgttgtcatttatctcttttttaaaatagttatacagtgtagatgtagagattacattggccttgattactagtttaggagagctgctcactcaactagtaattaccaagttgggtaactcttgaacgtttatgcatgtcatacaacccacccgtaactggcatattcacatctagtgggggtaccctttctgactcttccaagccatggaacttccatttactcatttcctattttgtgactgctatttttgtctttattgggatctgctgtttcagagatgatgtaatcgctatttggccctttcaccaagaatgcccaatccctgaggaactcagggactcaggaatattggcacacatactaagttaggctttgcgcctttccccagatcatccttgagccccctgattaccttgattgccctgactgctctgattgccctggtcggcccctagttgtgcaggcacaaccctatttacccgatgcagacgttagggctggcccaagctcacacgacaagggaactatgaaagagatgtcgcatgcggaggaatgcagagggaaagaggacaaaaagagacagacagacatagaagagagtcttccaatttgaattgaattgaatgcattgggatctaataatagttatgaatccgtagggaaaaaagagattaaatttgtgatactttgtgttccagaattgtcctcaccacggatccaacaaccctagagaagagaacataccgcgtcatcccttacttgacttcttccctcctacacttcactaccatcgtaagttgacttatctttccttcatcttccatcttctgaccagcgcagaatcaatacaatcaccatgggtaaaaaaagcggaaagaagaacaagaagggcagcaagcccgtcgcggccgtagagagcgccaaggacgtggtgtaagttgaaaaattcaacatgatgccacatcaccatctaaccgttcagtgaacccgagcaaaccgaaggccagactgcgaccgaacagactgcgcccgagactgcgacacagcctaccgagaccgtcgcggagcctagcaaggcgcccgaggccacccccgtgaccgaggccgcaacggagatcccagctgtcgcagagaccaaggatctggagaccaaggaggctgtgaaggccgagcaggctcccgcgacagagggtacggtggaggagaccgtggagaaagtgcaggcctccaaggccgggcagttgggcgagctggacgatggcgctaccgcaggcactggtatgacggcgtgttagtaatatgcgatgaattccgactaacctgaaatctgcagtccttccggagacgatcactagggagcccgcttccttggacgtcctgaccggcgctcctgcgacactggtcgagcgccccaagacctcagactcaaacgcccccgctgtcgctgcgcccgtgcctattgccgccccggccgagaccgacgccgcccacacgaagcgcccgtacgagaagcccatcttcaccaacgaggataacttgaagccccacaagatgcccaagaccgacgaggaggcgattcaggctagcgtggcggaggacaagaagaccattgagaccttggccggtgttggaccggctacggctgctgcgttgaccacccctgagcctgagcctgttcaggctgaggcacccaaggctgttgtggaacagaaggagactcctgtggttgttgaggcacccaaagtcgaggagaagaaggtggaggcacccaaggtcgcagaggagaagaaggtcgaggcacccaaggctgttgtggagcagaaggagactcctgtggttgttgaggcacccaaagtcgaggagaagaaggtggaggcacccaaggtcgaggagaagaaggcggaggcacctaagaaggttgaggagaagaaggttgaggagaagaaggctgaggagaagaaggctgaggagaagatccccgtgtccactcacaagaccacccctgctcaggccggcgccccctcctctcccgtagcggtcgccgccgcgaacgctgccattctcgcttccaagggcgacaaggctgctgctccggccgccactccagttgtttccaaggaggccgagcccaagaagcccgaagctgccctgaagcgtggcgacgaggcacagcctgaggaggcgttgcccaaggccgaggagcctaagcccgagaccaagaccgaagctgtcaaggaggaggctgccaaggcccagcaagatactcacaagacctccgagtcaggatcgcaggccgagaagaagaagggcgggttcatgtcctggctgaagcgcaagttcaaataagtaaagtaattgtggagtgcgagagcctgtgtatgatcagtattgtacgctaggtggggatgttggggaggggggcttgcaacctacgtcaggctgccttggttttgtttttctttcttttgtcagctttgatgatacacccgttgaaattatatatcagatcagaattatagtgcttattatggtgtcttgccttggagtgaatgtagaaggaatattgtttcaagttgacttcgagtcgggcttggtgtcctcatgtagttactccgtacaccgctagtcaaatcaattctccaggtatttcccttccccctggcgaatcaatattccaatattccaagctcgtcattagcaggagcccactggttgcaaccaatgaaaacgacatcgcaacgcaacgtgaacactatctctcagtggagacactatatcaaataaatctacgactagtgggccagcggagtcgatccaataatagtttctccgcttctattcttgcttgtgggtatacactagttgtatagaaatgattagtatcgttatacaatgcttgaccatttcgagatcgacttaccaggtcgcgttcattataggtattggtgtcatgttctgcagcatgacgcagttggtagttcgttcttctggtacaattatcaacattggaaactccagcgctctgttttagacgtaacatacctttacccaagacaatatagttaccgggattcattggcattagttgctgtgtcggcatcgaggcacttgaagatttccctccttgaaatgaaaaagaagaatatgaacgagtagtagcaatacagcatctcggcagatatatatcgagcctactatagaccaaacctggaagcatcactatgtggaggaagtggtaaaagtatgcgagacccttgcaggctgggaaagacctatgtttggtggtgtggacggaaaatacatgcctgaaaattatctcaccaacctctacaatcgggactttcgccctcaagaacttaccgaaaattgtcaaatgctgggtatggattgctcgacattcgtcttctaccatgccgatctcggtccagtaaacatcattgtggaagatataccgaaagctggtactattgggatcattgattgggagattgctggttatgtcccaaaaggatggatacgaaccaagttccggttgtctagtggactggatcttcccgacgcgagccccggcgaggagtcatattggtggaggtcggaggttcagaaattactagaaaaacgtggattcgtggaccatgcgaaagaatggacggcatggcgtcgaaataaacctatttcgcagacgaattagtggcgtggaaagtctgtagtggcggtatgatacgatgctcaatgtatgtgaggcgccaggtcgatctgaagaatagaaagagtgcattcaactaattaactgagatgaagaaagaaaaaagaagcaggttgcaaggtggaagcagcctgttgatatagctgaccctttgcaaacgttgcaaacctcgaaccttcttgcttagcgatctagcaaacaatctatctagcaaacaatgcaaacagcagatagtcgccaatccgtagagtcatagaacgggcagtcatgcagatggtaacagaataggactagattccacatctccatgcggggtccccgcagattatgtgcccgcttacaatatttcgggcctcggtaacctgggaagagcataaaactagttgattgatgaaattctacatccttcactcgcataacacctccaattcttcaagatgacatcccttccacgtaaactatggcagcacccagccccagagtcgacccaaatgggccacttccagcgcgacctagagcaatccaccggacgcaagttcgacgtgagtgaatttcgcctgtctaacgataatatccacctaacatctcccagtctttccatgatatgtacctgtattcaatcaagaaccgctcggcattctgggaattctgctggaaatacttccaactgattcacgagggctcctacacaacggtagtcgatgagtccgtgcgaatggacagcgtacctgaatggttcgccggtgtgcgtctgaacttcgctgagaacctgcttttctcgcgcgttgctggcggcaagacagataaggaggacgacaagatcgccgttagtgaagtccgcgaaggcgctgcccatgaggttgtccacctcacctggggtgagctccgacgacggactggagcgctggttcaggctatgaaagctcatggggtcattcggggtgatcgcattgctctctgcgcggcgaatagtattgatacactgcttgtacttctggcatcgacggctctgggagctatcttctcgtccagttccacggatatgggtactaagggtgtcttggatagactgcagcagataaagccgcgctggctgtttatggacgacatggcggtttataatggcaagaccattgacctgcgatcgaagatcggggaaattgttcaaggcatggcatctgatcctggattcgagggagtcgtctcaatacctcggttctcttcgcagccggccgatatcagttccatccctaagaccaagcctctggcggagtttcttgcaaaggcaggcggcaacgagagacttgaatttgaaagagttggattccgtgatcctttcttggtggtttactcgtctggcacgacaggacagccgaagtgtattgtccattccgtgggcggcgtgctgctaaactcgaccaaggagggcagattgcataacgatctcgggcctgattgtgtcggcttgcaatacacgaccactggatggattatgtatgtgggttccgtgaagacgttgctctttggggctcgggtggtgctgtatgatggaagtccatttattccaagtatcactgcgttggtcgatcttgcagcgcaggaaaagtaagttgttgacatccacagatgtacatttacagttatcggctaatcaattgcagggtgacccaccttggaatctcaccccgatggctgcatgagttacaacaggctaagatcaaaccccgcgagaacgtcgatctcagctctttacgggttgtcacaagcactggaatggtcctgcgagatggattgtttgagtggttctacgacgaagggttcccatcccatgctcgcctgaataatatttctggcggcactgatatcgcaggatgcttcggaaccggcaaccctcttgtccccttgtatgttggcgggtgcgccggatgtagcctgggcattcccgtggaagtctacgactctacgattgacggcggcgacggaatcaaaggtgtacccgttgaggagggtgttccgggcgaattggtcgccacctctgcttttcccaacatgcccacactgttgtggggtgacgatagcggtgagaagtaccacgatgcgtatttcgggcgattcgatagtgagcgccattcacccctccatgtgcgtaggactacagtcactaaatctgtacagatgtgtggacccacggcgatttcgtctccatccatccaatcacaaaacaaatcgtgtttcacggacgcgcggatggagtgctcaacccctcgggagtgcggtttggatcggccgagatctaccgggtgctcgagggtcaattttcgaaagagatagcggactccatctgcgtagggcagcgacgaccaacggatacggacgagcgagtgatgctctttttgctcatgagatcaggggtagcattcacatcggatctggttgcacgagtcaagaacgcgattcggacagagctcagcccccgccatgtgccgatgttcacctttgagacacctgagattccggtacgtactttcatagggaagaaaagatctacaaaagcgggactgacccagaacatcgtcacagaccacggtcaatctaaaaaaggtggagctccctgtgaagcagatagtctcgggaaaaatcattcagccctcgggtacactgctgaatccgaagagcttggacttttactatcaattcgccaaggtggaaactctgcgccagagtaagctctgactggacccttggcctgaggtctccataataagaggggcagaccggcttcatcgggatcgtcacttctgccaagcttttatcaagctttccagggttagcaacgggatcgcttggaagttgtgtatatgaacacgtagtcgagagaaagtaggttggaatacgtagattgaattagactggattaggtagaaatactgaagatcataagtctaaggaagaataaagtcgaagaaggacaagtagagggaagagctgagggctgatggagtgggcatccactgcgtcatcgaagcttttcgatttaccgccgacgttttgccagcgacacggagcacggagggtatttatacaattcgatacgattaattacgctcgatcgtattttactccaccgatctgccgccaaatctcttcctcacctggtaacatcgtaacctataaaagtactcccctccccgcacgtctatttaccgttctcattacttcttcaaccctctccttctcctcaatctctgctttttcttcagttctttttgacctggtctctttctctcttgttttttaccttttacctatcatcttttattcgcaattatggttcatctcgccaaagtcaagaaggacagtgagctcccctcggctcgtcaatttgactccattccccccatcgagacaaatgacgccgacaccaatgtctacggcactcactttgccgtggaccacatgccccagcatgaaatgccagagcgggagatgccccgccagatcgccgctcggatgatcaaggatgagctgagtctggacggtaaccctaagctcaacctcgccagtttcgtcaccacgtacatggaagaggagatcgaggagatcatgaccgactccttcagcaaaaacttcattgattacgaggagtaccctcactccgccgagatccaaaaccgatgtgtcaatatgattgctagacttttcaacattcccaccgatgccgccagtgagaacgccatgggtacttcaaccattggatcttccgaggctatcatgctgggcacactggctatgaagaagcgctggcagaacaagcgcaaggccgagggcaaggacttctcgcgccccaacattattatgaacagtgctgtccaggtctgctgggagaaggctgctcgttactttgatatcgaggagaagtacgtcttctgtaccgacacccgcttcgtcatcgatccccagcaggctgtggatctggtggatgagaacacaatcggtatctgcgccatcctgggtaccacctacaccggcgaatacgaggatgtcaaggccatcaacgatctgctggtggagcgtaacattgactgcccgatccacgtcgacgcagctagtggtggcttcgtcgctccattcaccgaccctaacctcgtctgggatttccgcctggaaaaggtggtttccatcaacgtctccggtcacaagtatggtctagtctaccccggtgtcggatgggttatctggcgcgcggtggagtatctgccccaagaattggtgttcaacatcaactacctcggagccgaccaggccagctttaccctgaacttctccaagggtgcttcccatgtcattggacaatactaccagtttatccgcctgggtaagcacggttaccgtgccatcatgaccaacctgactcgcatcagtgacttcatggcgtcagagtttgagaagttgggcatggtcatcctgagccagacgcagggcaggggcctgcccctggtggcctggcgccttcccacagaccccaatcgggtctacgatgaattcgctctggctcaccagctccgcgagcgcggctgggttgttcctgcgtacactatggcgccccacagcgagaaaatgaagatgatgcgcattgtcatccgcgaagacttcagcatgaaccgatgcgacagtttgatccaggacttcaaacttgccattgatactttggatgcaatggacaagaatatgatggccaagtacagagtgtgagtttattctgtcctaatgtttcgattttcatactaacagctccacaggcacatgaagaaccaccgcaaccaacctcgccaccagtcgcttattcaccgtcactacctggaagagaagcactcgctccagggcaaggatggcaagacacatggcgtgtgttaattccgttgtgtaactgcctactggcggtttttgaatatacgtgcaaaaggattgaattagatgggatgttgaaggtggatatgtcagtcctacacgcagagtatcttgtgtcctcactacaggatccaactcattgggttgatctcttgctgtagtatatacaccacgatattgaaatgaacaaatcgatgaacatgaggttgagactggccatggcaagttagcgcgttacaagaaacgatatagtagaccacagtcctattcgggaaatagctgtcagttacatctatcgcttgtgatgtcatgcatacgtagatttatataccaaagccctctcgtgctgcaacggatgcttgcatttcctgccattatcccctcactactcatataccatgaagcgtatctcaatcgacccgaaggatgatcccccaacccgagacctcccactggcgacttccaccccggcgcaacttcccccagccaaggcgacaaagcttcatccatccaaatcaggcgaagagaacgcaaccctgttcttcgtgggaacggccacaacgattatgtcagttcacatctagaactgtatcagtgtgtacgtgtactaaaacaaagcagagaatgggcgggaatacggattatgactgatgtcagctcttgatgggaagtcgaatgctcacagactaactgtcttagcccaacttcctccacgcaggcgaacatgtccacctcggtccaggcgtgtcaagcgagcgcctcaccaacccggccgtcgacctgcacgacctccctcggattgatcttgtccttctttcgcactatcacgagtatgtctccgagcatagaggtattgagcgatcactgataatgtcagggaccattttgataaaatggtcgaggcttcattgaggcgtgatctacccattatcacgacaacacatgggcaggagcgtctcgcttttaagaaacaggacccatttacgtctgtatgcgcgcttaaaccttttgagcagatcgaggtcaatattgaaggcaccgaaggccccagacagccccgcctgcgtgtaacggggatgccggggaagcatgtgcctcctaagcgagtggtagagaagctcaacgcgctagctaaggcggtgggtggcattttcttttctagatattcctactagatggcaatcaacctaacacagcaatagttcccaccaacgaacggctggatgctcgagctcggccacggcagctccaatgctgcagacttctcctgcggttatcgcatctacatctcgggagacaccctgatggtagacgagctgcgcgaaatctccaagcgatacgcggaccaacgaatcgacctaatgctcgtccacctcggcggtacaaccattccttctcccttagtaggaagactaatggaaccgctagcgttgacggttacgatggatgcggggcagggtctgcaattgatccagctaatccaaccagacgttacgatcccgatccactatgatgattacgacgtatttgcgagtccgctagaagattttcggcgcaatgtggaggcggcggggttattgaacaaggttgtgtttttggatcgtaaggatcagtattgctttcgagttatgggatagaagtgcctaatagtaagacattgggtttttgtctgttcagctcagccctggacgcgttggtctggggctgagaagggctccatcacatatttcgactccaccattcttggcatggggaatgggacttcatacgagaattatgatttactttgccttgagcggatcttttggggaatttgggggcagtttgtaaccgaagtatggtatgtacataataggtgacgaggctctacacatggctcgtatagtgtgtttctctatgttgtatatcgaaagtattgggtcaaaggctttctttcgaatcttcttctttgagtgttcatatattctatattgtagttagggcggatatactagagagatgatatctacacttcctaacagttaatcggcattatgtcttatatcagatactatgctattctctgtctcatatcactcatttcattcaattgctatatactctggcatcccaccaaggccatccattgtttaccctatatatagaacaacctctccaatcaccgcccgtcaacccgctagggtccaccaaatcagcctcttcccctctctccctctctcctttttctcaagatcaaaagcagtgatgcgcaacctctttaagagcaagtcgccttcgaatcggacaagtcaccattctatgcgcagcgccgaacagttggcccaccccgcgtttactccaccggaccccaacgcacccaacacggagtctgaccggcgcctttcacaattcgagtactctggttctgtacagaatcagcctcagggtttgaatcggtcgcaaagtcagcgtcaaaaacctttacgtgaccgaccgaccgtcaacgtcaccgtccccgacgactcgcgcaaaaagggccgtgtcgagcgcagcgtctctgtcaagggcaaaccaatctcacaacctacctcacctggaactttacatccagagaccttggacgagtccgacgaatttccgccacatctccggcattcctacaccgagaacccctcacctgtggcgccgcaatctctcgcgtaccaaccgaaataccagggccaacgagctccccgaccttcccatcctgctcacgtccaagacaaccccgagtggtcacagaaacctgtgcagcctgtgcaaccgctttataccaaactccagcgatccaacaccgactcgacccttgatcagtactcccgaccgtcgcccaccgatatccccgaatcaccacgatacacggaacatcttcatcggggacaggctttctctgcccaggatccggtattgaatactcggcccccatcccagcagactcacgagccgctttccccgttgcagtcccgttaccctgacgccatgcagtcttccgcgcaggcatcaaaccagggtttttatccgttggacagacaaaaatccgccggttctccgcagcagaaccggagtcggcaggggagtgtgtcaaacaacatgcctgatcccggacggagtacacccaccaaaacacaccgccgggaggagtccggggaagtggacgtgcgggcattgatccagaagcatgatgaactccgtaaggattatgattcggtcttggtttttgataaactaacaatgagcagaggccaagtattccaaggtgaaacgatactacttcgagaaagatgcgcaggtgcagcatctccagaacacggtggcgcaccagcgaatggcggtgtcgcgtaccgtacttgacgataatgaatacaccagccgattccagcgcctggacggagcgattaaagacctggcattctccgtgcgcaaagattggcgcagtattccggcgtggctgaatggaatggtcactgacgatgctttgtcggtcggcacgaaagaaatgaccccggtcggacgggcagtaatcagccggtggctagtagaggaagtattccagcgatatttccatccgtgcttggatccgacatttagcgtgcagctgaagagtatcgaaatgaacctgcgacggcagcgaccgacatcggaagaagaccgcgagaatgcttccgcgagactctcctactggcgtcgcacgaccttcgacggactgggtgattccttagtcggacccgaggcccaagaacgtcgcgttgagctagtggagcatctaatcgtggagctcgctgccttcataggatcccaactgcacgaaatcgcgctgccagggctagaagcaagcgtgcgtatgattatcgagaactccgtcaacatcatcgagaaaatcccgctcgaagctcgcgatgtctgcgtcgattacttcccaccgggcatctccctcgctgagcaatacatgaaggtcgaaggccaactacccgcactgagccacccgcccccgccaccctcggacccagagcagctcgaggagcctgtcgcggcagagggagatacctcatccggctcaaccggagcggtagagagtacttcatcggcacagaaaaagtcgacgaaaaagtccatatttggcgcgttgataagccgcaagcatggcggcgagaacagtcgttcgacgccgccgcctgggccagccgaggacaagagcgagcctgcagaggtagcgccgagcgccccgcgcattcggtttgcagcgttcctggctgttgaagtgcgcggcaaggggcctgcaacggtgctgatcaagtcgcccgtgtggctggtggaataaacgtgatccatcagtgcggccggttagattggcaccattagcagtggttctcgatttaaatggtggagggtgtatatagagaccggtcggagctgtcgcatggtgacgaagcttatgacttgttatgtcctttgatatcccaaggcgtttcagttgtccagcggcggtttgcactttgcagtggtcgattttcttcttttcttttctttgcctgacgattgcctgacgactagaatccctgattctgctatgattgtgcttttgagtagaaagttttgcaattcgatgtttcttagcggcattcttcgtagctaaatattcattccattactttcagtccatatccgcatcaatactcaataccatataccttactcattaaatcatcctacaacggcggcggcgccagatccaacccctcaacctcgaatttaaacgcatcactccgtgaataactcccagcaacatcgagatcgagccgtccacgctcgcaatcatccaagtcaatgcatgcgatagctaaaccatcacccgccgccacagcaggactagactccgtagcggacgtgccaggcgcggaatccgtcaccgcagcatcgctactatccggcacgtcatccgtgcagacttcccacagcggaccggcaagaacgtctccaagcggcgaaacaatacaacttccaccccgacagacataatccaagaccgagtctgacggatccagggatgactgcttagtattcgtcgcgggaccctccgaccgactctgggcctgatcctgggcctcgccgtgagtctgcggccagacaatctcatgcggaccctcagcagcgacggacattttcatctctggatcgtgcgatttacccgaactagattctggaattccatcctggcttgcaccggtaatccactccggcagctcggagctacgcacgcactggttcgccgagagcacgaagcagcggccttctatgccgatggtgcgcatgagcgggagccaggtactgcgggcgtcggctgtgggagcgagatagatattcacgttctgggaatatagactctgacgcaggaggggcatgtagctctcccagcagattgcagaggctatggttagtgggataccgtttagggttgttgtgacagcgcggagagtcgagggcgagccctgagcccaaatcatgcgttcagcagccgtctaccaggtcagtatacataccgaatgatagcgccagagaagaagaaaaagaaagaaaagtccataccggcataaccttcctcctcttccccagaatacctctaacaggatcaacataaacaacagcacaatacaaactccctcccgctctctccaccaatccagtaacgacgaaaactcccgtctccctcgcaacacgctccagaaactccctcgtcccatccccgcggaacctcttaccctctgcaatctccagcctgcgagcaatccagtcagccccggccccagtcggtgtatcgcctagatcaacagcggccttgaaatacacgaggaattggtcccggccgcgcgggtgtcgacttcccaccgcagacccgaacgaacatgtccgcgggtatccgcctagataggcttcagggaagaggaggaggtggacgccgcggcgggcggcgagggtgcttgttcgctcgagggcgcgcagggtttcggatagggaggtttgggtgcaggattgggcgactgctactgtgagagagggcattttggattgatgttgggtttaggttactattggagaaaggagaaggggaaaaggggaattgagttgacaatgacggaatgggctcgaggaaaccttggatgcttgaagcttggctgggagtacccgtgtagtatatattgaggttgaatggggatatagagtgtgttatgtagactttgatatcagtaggtggacaggaagtccaaagaggcttcagactatcggatgaagtaactgtgaaatgtgattgtttgcttttaaaaagcctataaagtctgcactttcttcctcttcctctcttaatacttcctcattatactttcacctatacacttataccaacgagctttgaagaaatgtcgacctgccacataagaaagtgacggtggtttgatgaagcaatatccgagagagatattctttcatatatccaagtatctatgatatagcgaaaaagaagtaacgttacccccatctgacatttatcttctctactgacccaacttgattctccaaaggggtctatatggcgttgttccttggacgagctcggcaatgaggcacccgtctacctcttgtgaattctcccttcttcctacctatatacatgcctcgattctcagggatgaacctcatttacgggacgtgttacccacaagtcgttgaacgagtacaatcatgcaaaccgcgcgcatgcatgccacgaccaacgggcttcgatgaagaggaccaaggttattggaaagcccacagagctacgctactcccagcaccgaacaacgagcagctatttggttggggtttccatccataatcaacgagagaagtcgtttcgaacatgttgctccgaagctttctttctacagcaccttcaaaacctcgactgcgttgttctcagtcaaagccattttattctctcggtgctatttcggataacatcagtgtcaggatgtgctctggagtttggttttgtcagaatattgttcgcggcatgacatatctatccaaaggctgcgatggcaaatacgactgtaaccatagttggcttgtgggatggaagaattccttccgtcgtctataacattcagtttgatcttcctcaaggccctattgtggctcgacctctgaggcatgagatactatcgattgtaacggttttaattacaaatcaagacataagaaaaaaagttgtgtatgaacagtagggtataatcgaaacaaaaagaaagtagtcataaccgtatagaacgctgtacaaaaatagaacttttcttgttagccaccatgattaggggtattggtcggcgattaacaaatgaacctggacgaaaccatccacatctcgtattcctcagtggctggctcgcagcgtgctcagcctttccgagtactcaggaggggcaaggcccacgtcaaccacctcactgcgagtatggttggaaaaatcggtaggagaagtcacattgcgtgggtggaagaactcctctagttcttgctgtgtgacagtgacaccgagtgcagccttgatggattcagcgtgcttggcttggctcgtgaactgcaccgggaggcggagggagattgtcggtgtcatgaggttggctgcgggggtgtggtatgtcaaggagagctcgagggcgtagatgcgggacatcagacaggaatggaaagtcgggacaaaagcttttgactcgggcagggtgacagggaccacgactgatgcggtgtagtaagtgtccccggtgaatgctgaggacgggcccgttgatgaatcagatgacgatgagtcggtggagtcgcggcgcatcgagttggctgctgatgattgctttgtccactgggcggattcgacacacatggtcaacagaggcacgctttctgtgtagaggccgcatccgatatgggcgaagggcatgccggttgaggaagggaagtcatcccatggggccgcactgaagaatgtgctgacgcgaagtttgctggtcattgttccaagtgcgggaggcttctcgtccccgattggatcgaatcgcaggtttaccgtggccacagtgctcactgtatcacttggctcaccgtttggaggaagcaattgaacggctttgggctgggaggatgaagcaacgatgtgtcctaatttgcctcgcaatgttccgcgcttgacgctcttctctttgcgtgtgcagaaagatgggttcgccgaggtttcaactgggggttcttcttcgacaattggaatgatacggatcttcttggcaatggcggcgatagccacgaatccagggccggtgagttgtttctgaagaacagaggcccgaaccgtgtagccaatctgggacatgttgggtgccatatcatctagcagtgtcttgccattgctggcaaggatgggatcacccaatgttggcggcagcatagtgtgggatcgttgaatgtgagcattcttcttggtgtgggtgcagacctggggcaacaggtggtccgggacgacgaatgtgaaggggtattcatatgtccggccactctctagcactcgcggagtcggatattccatttcatcaataggctggcgcaacttaaggaacatctgttgtgaccccgtccggccggggcatgatgcccgttctaccgtagttcgagatacacctgttctcaaattaacattgctcacaggccgggcttcaataggacttaccttcaaacaggatctcaatctcatcaaatcgggtctcatgctcaacggtgacggttatggtgccatcaatactctctgcggtggtataagagttgacatgtcctggcttttgtcccgcaagatatatctcgattttaggctttgagcgtctagtccaggcatctaacctgtctgagccagagctgatgattgaagtggccgttgacattgttccacggaaaaagcaaagagaatatgaagcctcgtcccacggagaaatgcaggaacaatataaccgacacgtcaaagttaagacaagatggaatatcaaaaagaaaggaggtagaatagagatcagatcgaattgttcttaaggaaaaataaaggaaaaaattagtaaacggtggagccgttgacaaccgcaatggagtcagacaaaccaagtgtggaggagccgtgacaagcaatgtgagcaaggtttcagattgcctcatcgcatatccctcaaggttcttataaatcaggttggggtgtgactcacgagtcatctatagggcgcagctaccatgatatcaaatcacgaccataacctacttggaacgcccccaaatccaaaaaacgagcgatcgtatacacttcagtataaggaaggccgagccatggagtgatcggaggggagagagtgattggtcggatgcgaggatccgttctcgcccatgcacgcccttgggttgacattccgcttggccaaggagcatagaacaacgagaggtcaattcaaggtcgcacatgatattcaggtggatttccaactctaaagaccctatctctagaaaaacgcccttcttcttttcccgatcgttcagatccgatcttccaacctaaaacagccagtcaacgtccaagtacatcagaagtacggagtaacagagtacaaactcaagggggagaagtggagtgcgccttactaacgacatgcacgccctttgactccacccacattctcgaagggcgcccgagctcctctgctgtgctcgtgaaatggccaatcattgtgtgtcgtggaactctgtttatcagaatgccgatttccaagcaatatcccgtggattcgcatttgtaacactctccagtcatatgtgaggaccttcaggttttctagacatgaggtctagtataaactcttcccgcggaaaagagaatatggaacctgggcctagctccggccccagagatttccggccatagccgagcttttttgcgcgccgagcttgttttttcttgttctcacggagtgtcggagtgtcggagtaaacaaaaagatggagtctcggatggtgcaatgcgatctttcggtgtgcaaagtcatggggaggccgatgatcaggtgattcctatgcacgtgtttatatgggaaagtcgtgcttttcgagttctacagctttgcaaatatttcaagagctcaagataatcggagtattaagctacgtatatacaccaaaactggaataaaaaagatttagaataaattgtttcattcagtcactaggataagatgacatttacaagcatgtcccaactgataaattacgacgcagacccgtggtgcatttcggatcaaatcgtactcaaaaatcgtcgacgcgctttcacgcttcttctcgtctcgtacaagctagcacaaaaaagtgaccagctgcatccagctcaagattaaccgacgggaaacggcagaccgagcgaggcaagagacatcataaaagtctacatggctaaagatagccaggggaaaggaaggggaaaggaggtctatgtagtgcaacgtcgaaacaatcagtttcacttgaaaattagtcgtggttcaaatctgcataatcatcatgcattaagaaagaggtaggtatctgaagcccgtagataggacagcaaggaacgccagcagacgccgcaaccaacccgaaatcaatacgccacccgtgttcgcatatcctgggaggtgttagtaaaacgccaaatacacactggggaacttctgcaacttaccgaaatcttgcgctcaatctcccgaacagatcgatcaagctcacccgcaatcatcaacttggtatcattaggcagcagaagatacatttcgcaaagatctccgtcaataacgcccttcacaggggcatagtagctgcggtacatcaaatggtctcgtccagccagagggggttgctgggaagccagctgggtctccagaagctggaaaaagtcgacatcctcacggctgacaaaaggaacaaacattccaattgtgccttggagaccagtccagacaataatgtcacgacctccagcgactaactgagtcttgtggatactagtgggaatatcctgggcatagaagtggatcatcaactcgagacggtggggggttccatggagataacccttttcgtggatgaggtgcgccccagatccatcttcgtcagactcttcggaggccttgctagggcaacggaccagccacaggtttccgaacttgtcaccaccagcagtcgtctcgtaatccaccatggttgtactcgaggtccagcgtgcgatggaatcgtccgcgaaggggatcaagacattgtcctggtacttgtagacaacgtaggtgacactctcacggacgtcgctgacaatgattcggctgccttgtgtctgcagacccacaatggtcttgggtaccacgggtgcttgacatttccgtaggagttgcttcatgccaaggtcgtacacacgaagaatggggccgacgcctgccagaagacgcccttggaagccgagaagagcaagaggaggctcatcaacttgagtcttgtgaatgaactccaattcccgaccatcctcctggaatcgatagatatgaatgaaaccacaagaggacgagggagggctgactatcatatccttggcagttcccacaaccaagaaagtttcatcgtcttgactagagaaggatacagcggcaagactgactgctgcctcgttgtcctcaaggtcaagagtgaagatcacagatttggtggtaaccgggtccacaatttggatgcatgaagcccagtggccagtggctcggggatatccgaagtcaactggaggaaggtccgcaacctcgccattctgagcttgggaatcatcaatcagtctctgacgggtagcaggagagaggacattgttgtcggcttcaatgacgtagaagaggggttggtcggggtgcttcacaaagcgtcggggagtgtaagagagagggatggagtcttggagcatattgttgtccaatttctccacagtgaagatcctattttcggttagtaccagtccagaagaatctgcagtctcaacatggtataagagaaggttgatctcagaaggaacaattggaatttttcttttaaagtttcatccacatagaagttcggattgattttctcatcatagaatcaaggggatgggggaattggggggattttggatgaacataccgtagactgcggccctgaattccgatcatgccctccacacactgctcactggagaaattccatccccactctagcccaacatagtccaagggtgtgagcataaaactcttggtttggacatcggagtatcccagccagggacgggtgctgagcgccagcacagctgtttggcccttgaccgatacctgggatagtttcacaggtttggcaccgatgaagcgagttctggtatccgagagctcaccggttacctcgtccaaaacagtacgaaggtagacacctgagtaaagaccaatgtggagataaagagtcgtgcctcccgagctcgagtcagccatggccataatttgcaaggcagatggtgcagatgtcaaagcttggactgatttgctctcgagtgttgagtctggatcgaggctgagaatgcggacggtggagtcatcacatccaacggccaggaaggagctgcgcatgcgaccctctggtacctctcccatactcagggaggtcacggtaccagacatctgtcgtcgctcatcatactctgccaatgtcccgtccgcgtccatctcaaagtagacaatttcacctgagctgagtgccactgcaacttgacgttcattggttgctgctgcaacgatggaccgatgctgcggaacgggccattcattgactcgctgatctgcgaggatgtgacgaatgcctcgagggtgaacttggactaaagaatcctcgccgatttgttgcactgccagagtaggagccgaagaaaggaatccagtgtctgaaacttcttcgacaatttcgccgatgctcaggacgagggtgccgttggcaaaagagagaatgatgtatgtgtgaaactcatcggctcgggttaacttggttgtccatacagccgaaggaacttgctgaaggtccgactccacgatctcagaaaccttaagtgcgtgcttcaaggtccggaatgtgctgcgggccccagagccacagattgtgtagatttgaggggcatcatcctcactcaaattgaggattttactgtcaatcagagggctcaacgagttcatgctttccatgaggttgacattttcagcgcctcggggacggaagtagattggtgcggaagacacagagtgatcagccgagaatgagtcgctggaaaagactgcctcgttgggatcatcaccaagcttctcgaattggtagaaattgtgatttccagattcactggcggcatagaggaaaccgcttttcagaatcagcagattggttgatacaggaatcgtatcaaagtatttgatcgtcagtctcttcacttctccagtaggtttgccctgcttgtcttcgaccatttccaggttcaacttgaacagatcaccatcctcggtttggagaaggaagaagaaagcacctctcatcttgtgcatgactccagagacaatcgagcgcttgcgctcggggttttcggtgggtccacgacgtcgagggatagggacgcggaacgcaccctgattggagtggcggtaggtaatgttatcctccgcgcacaccaagacaccgcttgggccatcatcgcctccaggtacctggaacagcatggatgctgtgcgatcaacagggtcagaccacttgcgaacaacgtgattcagaccgaggtcaagttcgtagtacaccaaaaccttctcgagttcttcgtacgcttcaccagtaggatcctggtcagattccgagtagtccacctcaagagcagcgaaaacggggttgtcataaccgacgtccaagcagatcatggcaaaaaccaaggtctggggcttgttggcttcgagcggtgaggagatggtaagctctgcctgcgagtttcggttgagaacatagaccagcttattcttttccacggaagcaatcaggcacgcacgtccctttggatccaccgcgaggtattggcccggcacgacgcgacgaaccccggactttccgaaggtctccatatgaatgcgattgaagcggttctgggagggaacatattcaatgattgtgatgcgacccgagtccgagccgacgatgatgtaatctatgagaatcagcaaagtccgttgataactaatcgttacgagtatcaacgtcgctgtccagggcaggtctcaaccctctttcaaggggagacttcgtaggagtaccgtgctgcccaggaagcttggagaatcactaagttgtactcgtagaggggcagatgaggagcttaaaaagtaaagcgacatacctttgttgcttccggctacgcggaaagctgcgagggagcgaatgatgccaaaaacatcttgagagaaaagaggcgtgatcttgccctgtgccgggtcaggccggtggatggttaatttcgagcctgacgaggtgacgatctgctggtccctagtgcctgcgaattgacctaagatggcctgtgtgatggcagttgggggctggatcgtcagggagtacataaacatgtgcgatgtggtagccatggtgcgcgcgttgaacggtttccccgtaccacacaaaagacgtgaaagctttgtacatgcaattgcaagtcagggggtatgaatattacatcagtcccatccctgctgggtggagataagaaaaagaaacacctcaagatcacttggcacggatagagagaggtgtagccgtgtgatcagactcgaagaggtgaggaagagaaaatattcctggccctgtgggagcttcgactagcgcgatttgcacgtgatccatgtttcgaccgccttccacgctgcgccgattgatgcaaggcagatcgcctccgcataacgggctcactgactcccctctttcttgtttcatctcactttcactgttctcatccatatcaccacagttcatctaatcgggcgtttgatcagcccggcaatagtcttggtgatatacccctcatcattgatctagcttctaataatcacccacttgctctacaatcatcatacatccttcagccatggccgacgagacagctaccacagagcagccccccatcaccttcactgtcaagtcatccaccgatgccaaatacactctcaccctcccgctcactactctggtgtcagatctcaagcagaagctctcaaccccagaaaatgccgatacccccgcagaacgccagcgattgatctactcgggtagggttttgaaggacactgagacactggagacctacaagatcaaggatggccatactattcacctcgtaaagagtgctgcgagcaaccagcagcgccaaaacacagctgctcagcccaactcagcttctgcggccggtggagcaactccagcgatagctggtgtcccaaccaatctagccgctggtactggtaacaacccacttgctggattgactggtgcgagatatgctggattcgcacaacttcccggcgcgggccttttcggccctgatggcggggtaagtgagctattatggcggatggaagctattcagcaatgcctccaacagatagctaacattctttggctacttagatgggtcctcccccagatactgagtcgatgatcaacatgctcgagaatcctcaattccaatcgaccatcaacgaagctctgcaaaaccccgctatgatcgacatgatgatccagcagaatcccatgcttcgcgacatgggacccggagtccggcagatgatggaaagcccagagttccgccgcatgttgaccgatccgagctcgattcgacagatgatgcaaatgcaacgagctatgggaatgggtggcggtggacttggtggcggtgataatgcattccccgccccgggggtaacaaacacgaccgctgagggagccccaggttcagagcaacagaacgcgcaaataaatccatttgggcaggcggctcagaatcctcttggaaacgccaaccctttcggtgccctctttggagctaatccgttcgcaaccccagcccagccttctgccaccccaggcaccacttcacccggcggtgcacaaggtgccgattctacggaccgatcaacatctgctgaagggcagactcctcaggctgctccgaacccctttgcagctcttctgaacccggctatgttcgccaacgctggacaagctggccagggcggcgcgaacccgttcaatcctcagcaaaatccgttcctacgtgacccggcgctacttgcccaaatgatgcagggaatgggtggacaggacgcacaaggtggggctgccggtgcaaaccctctggctgctctacttggcagtggtggtttcggaggtggtctcggagcaccacagccgcctgcagacacccgcgccccggaggatagatatgccgatcagttgcggcagttgaatgatatgggattctttgagttcgagcggaacattgaagccctgcgtcgcacaggtggcagcgttcagggagcggtggagtacctcctcagccacccatgaatcatgatactttctgggctgctttcttttctttctagcacagccttgcggttacttttttgatgtattcaacttctattgattttgcgaggtgatgaaatgctccctcggtacctatgactttctcattccccttttagcatgcttatcttgtgtgagatccttagctagttttctggatatcacattgttccagggctcagaatagcatgggatcattttctaattgaggtttctgtgatactcccaatttcgtacaagtcttagtctacaaaccttgaatccaaccttggcctatcccagagttagtgtggatgcaggaattatatgaagcggttccggaaagggccctaatgtttccccctgaagaaagggctcgaaatgtctgtgtcctagattgtattatagttcgcatgctcttggtgcctgctagttgagtttccgggcttggtattagggtatgatatatatcagtcagatctagaatgattccaatttttgcaaccgtcccttggcgagctgggatagacgtatcttacaagtcttacaagtgtatattcggatacatgtgaatttgaccatccttttagtgccttcatccatatatgcacccccttcgcccctgggtctgcggtatgttgattaggtaacccggggacacgctggagtaggccagggaagcacgaagctccctattaagcccccacagttgctcgaactcctttctcgacgaacttatatcactcctgtggcactgagtgccgatttcagtcgttacttagctgttcctcggcagattgcgggcgagctgaagcaatccgatggtccttgacaatctactattcaacacccgcttcctacataaagtccaccgtcgaactgtccatcggccatctcgacaaagcatcccttgaacgagatattgcctacaccatagtcatccctgactcacgcgcttcgatctaacctttgcgggtcgacacgccgttacccaccgacgtacaaccctctccatactttgtgtacatgctgggtcgataactacccgttcactccgggtcgaggacaaaacatatctctttgcattattgaatatggcctttggtcaattctgttcccgtcagtgggcactgtgggtgctgctgcttgtgtcctgtaccggcgcattctacatccctggtaagcaccgtggcgcatattggttggactaagcatatgatactcatacttttcctcccaccaggatactcaattacccggtataatgatggcgatccgattcctcttctggtgaacaagattttctccgatcacacccagctgcagtatgcgtatttcgacctgcctttcgtctgtccgccgagcggcaaaacacatggcggctcgccgtttggatccggccaaagcatctcgctcaatattggggaggtactgcgtggcgatcgaatcatgacctccgacttcgaagttgcgatgggaaaggatgttgagtgccagtcgctctgcacccgtgatgttagtcggtcaaatgtgaaatgggcccgtcaactcatcaaggagggatatgtgatcgaatggattgccgataatcttccaggagccacgagctttgtgactgtggatcgaagccgcaagtattacgcttcaggattcaagcttggctatcgagatatctctccagtcaccggacagcatcggtactttatcaacaaccacttcacgatcgtcatccgctggcggagcgcaccggaaggagggaaggtgatcgtaggctttgaggtgtacccgaagagtattactgccgaggaccgcctggaaaatggatgccccaaagctgtccacaatagcaacgaaggactggggctgtatatcgcgccgaatctttcgcgaatggaagagaaatattccggactgtcatatatcccagatgatgatgacgaagatgatgacggagccacactgaaggttccctacacctactctgtctacttccgagaggacaccaacgtcgagtgggccaaccgctgggatttatactttaccaatcaggttgaaagttcgataacccattggctggcgatcatcaactcattgacaatttgcaccgtactgggagtgaccgtgttcgtcatctggagccgtacagtgcaaggcgatctcaagggtcgcggcgatggtgcgatggacgatcggaagatgaagggccaatctcgacgccggagtggcaagtctgagaagaaaggcgaggggcttctggatgatagcgcagatgtcgagcgcgatgcagactactcctcagacgatgaggctgtcgaagatacaagtggttggaagcttcttcatggggatgtgttccgtatccccgcctatagtggtcttcttgctcccttggttggatcaggaatgcagttgttattcatggcttcaggcttgctcctgcttagctgcctcggaatcttgaacccaagcttccgtggtggcttcgtcagcgttggcatgggtctgttcgtctttgcgggccttttctcaggttacttctctggaagactttacaagacctttggcggaactgcttggcgcaagaacacgctcatcgtgcgtatcctactccaattattcatgtgctatgctaatctatagttctagaccgctttgcttttccctggtctggcattctgcctcgtgttgattctgaacttgtttgtctgggcgcaagcatctagtacggcaattcctttcggcactcttattggtctccttgcactttggctgctcatccaagttccgctggtatacatcggcagctgggtcggctatgtgcgtgcgatgccatgggagcaccctctgaagacgaatgcgattgcccgccaagtcccaccccagccctggtatctccgcacccctctcgggcctgtggtaactggcgtcgttccatttgcagttctttttattgagctgctattccttttcaagaacctatggcaggacaagtctggttattactatgtcttcggcttcctgagtgctgtctcaaccgtgctgattgtcacggtcgttgaggtgaccgtgatcgcaacatacagccagctttgctccgaggtaagactgttcttggcttggtttctggatcatactgactcccttagaattatcattggtggtggcagagtttcctcaccggcggaagcagcgctttttggatttttgcctactgcatctggtattacatgttcaagctccacatcaccgggttcgtgtcaagcttgctgttcttcagctacagcttcctcgcttgtgctgtgtatggcctgttaactggaaccgttggtttcttggccgcttatgcgttcgtccggcgtgtttataggtaaggtcattccattgaatctgctaggcaagaggctaatcgtgagaattgcagtgctatcaaggtcgactaaaagttgacacagctaccatcctcttcttgaacttcttcaacccagagacttgtctctttaacatctacctctttacgatctgtccgataagcataggtgaagtcatctaccaccatggcgtctagtattctattttctgcattttctggctccgaacttttgagcctttagttcccccgttgttgaacacacaaggcacttctctttccttattttgtgtccgtgccaaagtatacatcagttataatgtattgatatgtcgctcaaatccgaggacaacgttacctagtatgtcgacatccactgtaaatcgaatactgttttgggaagtacgatgccaagcccctaggaaaccaagcgttgctctttcccggaaacccctgactacgatccttcccggatttagctcaaactgtactggcatatgggatcgagctcgtggctataaaacagaacaggtatcccctcacaaggaacgttggaagcaatgtagaagtatggctttcgtctcgggtttcttttcgcctttctccctcaaacacaaattgaacctgatgttgtatttttagttgcaatatggggcagggaacaaacgcaaagccacgggaaggtgggtgccgcggccatccgggtaagccggttggcaaggggtccttgcctttctctttgatagtgtttatcagatgtgatcaaggcatacacaccgcattacactacctgaaatagtatgcacatcataagtctatatcgggtcaaagcatccgtgactccgtgacttgcaaatttgtactccgtacatcaatgtagacgtggcaatgtggagcaaatcggacatatagcaagaatcgtgcatatgacagctgctaagaaatagcggtgactatgcttcgcctccaaggtacggagtacatatgtacataaatccggggcgatcttagaccactcgccatggcgtgctcggaaagggggattgctcattgtggagctgtgatgtacattgcgttgctctccttttctttccttttgcttcagcaaagtttgaagagatgatagaagaaaaagagaagaacgagaaaaggagtcccgtcggcggtctattccgtcgatatctcgcaccctcaccgcgctcttcttcaatagtgtcaaatcaggcggtttgattgggcgtcaagataagcaagtggatactgaactctaagctcccactctaaccatgttgggatatcctaagagaataaaagactgcaaccattggctgagaagggaatgacacgatcttatggatcccaaggtttgcctagggtcggcttcgggattcactaggctgaaaacagttagcctttacaagatcctgtcacgctggaaacgctgccatggacgtgggctgcccatgccgttatccactccggggtcgagtgcgcgtgggaactgcactgaagctagactgcgtactaaaacgccggcctttgacttgatatgctttgatcggcattattggtttggaggggatgagatcggtggtggttttacatgctcggttggtattgtggtggtattgtgactttccaatgtgaccgacaccaacgcggcccccatagttgtaaagtggcaactcactcggcacttggcccgatgggatttgattacctacaattgataaaaagcactggtcgtgtgactgagattgttagtttgatctgtttattaaaagataacgagaatatccacttgggagagaaagtatgtggtttatatgtcctccgtaggtaaaggtagattatctacttcggtattacgttaccatacaggctcttccgaaatcacaccatcggtgcctcaaatgatcccatcgtccttgcgggggagtacgtcagtaccggatcacatcccctgatctccgttgcaggcgggaactactttgaactaatcgatttgggatgcaattgcaatgtccaggccttttatggagtacaggatggtcgaatctaaagagaatatgatcttcattgggtatcgcaatacattacatgaaaatacatacccttttccgtcttggcctgcatctgtttgctgttttggtccgtcgctctcgaattatctcgtttttgcctctttgggtcttttcttttaaaaatcttttttttcctttgttccccacattctccctcgacttcatatatcactcgctctcccacactttcttccttcttcattcctttctccctcaaattaattccacctcccgccttccgttggccgtctattgaactggatattcaccatggcgaccaagaagcccaacatcctctacatcatggccgaccagatggccgcgcccttgttgtccctgcatgacaagaactcgcccattaagactcctaatctagatcgcctcgccgagggcggtgtagtcttcaactccgcatactgtaactcaccactgtgtgcgccttcgcgatttgtcatggtcagcggccagctgccctccaacattggcgcctacgataatgcggccgaactgcctgcggacaccccgacatatgcgcactatctgcgacgagagggataccacacagccttggccggaaagatgcacttctgtggcccggaccagctccacggatatgaacagcgtttgaccagtgatatttaccctggtgattacggctggtccgtcaattgggatgagcctgtaggtcaacttgcgaacacccggctgtggcaccactgattggaatttaggacatccgtgccgactggtaccacaacatgtcctccgtgatggaggcaggtcccgttgtacgcaccaatcaattggattttgacgaggaagtgatttacaagtcgacccaatacctatacgaccatgttcggcagcgcaccgagcagcctttctgcttgacagtctccatgacccacccgcacgacccgtacgccatgactaaggagttctgggacctgtacaatgatgtggagatcccattgccgaagaatggagctattccccacgaccagcaggatgcgcactcgcagcgcgtgctcaagtgcatcgacttgttcaacaaggagatgcccgacgagcgcatccgtgccgcccgccgcgcctactatgccgcctgcacatacgttgataccaacatcggcaagctgctgcgtgttctcgaaagcaccggtctggacgacgacaccatcattgtcttcactggcgatcacggtgacatgctcggcgagcgcggtctgtggtacaagatgacctggttcgagaattcggcccgcgttcctttcctcgtccactcgcccaagcggttcactccgaagcgcgtgtcggagaacgtttccaccatggatatcctccctacattcgtcgaattagcaggttgcaaactcgtctccgagcttcctctcgacggtgtgtccctcgtgccgtatttgaccggcggcgagggtctccgcactgatactgtctacggcgagtacatgggcgagggcacccaggctcccctcatgatgatccgtcgcggccgctggaagttcatctactcgaccatcgacccacctatgctctacgatctcgtcaacgacccagaggagaggaccaaccttgcagctggcctccccatcccatccagctccacccgcgcagccataatagccaaccagaccaacttatcatctatcaacttaccaacccctgacgacaccccgcacgcatcgccagttcctcagcgtgtcaactcggcagactaccccttcccctcgaacaccccccctcgcactccaagccccgccaagctcccgcctgcagtgcctaaaaccaccgacccgattaaaatcctggcgttcttcctcgaggaaacccacacccgctgggatttggagaagatccatcaggatgtactgcgctcccagcgccgtcgccgtctggtctactccgctctgatccagggtacccagaacgtctgggactacgagccacgcgtcgacccaagtactcagtacgtgcgcaaccagggcaagggcgccctcgacgatgtcgagctcatctcgcgctggccccgtattctccagcaagccgctactgccaatgggatgtctgcataatcaccccgatcaggttttctgaatatacccattgactcgacattgaaaatattccattcttgcattctttatctttattcatttctcttgcatttcagcaccatttctattacctttttgcggcattcccggcattctttcatatcgggatccaattcttcttttttcagtgttgatatttctggattctttacatctctcattctcatagtaaggcgcgcgctatacccgggacttattccccaatctgcatcttttcatgtcggttgtggctacgtggattattttgtacatagttgtgctcatggttccccgggttgggtgtcttaccctgtatattgcggctggtttggggtattacatagacaaaatgcaatcagactgtcatttgggcttctgtactggtggtccacgttcttaagccacaatcaccatatatgtaaattgtattccacccagacgtcctctggtaacatcagctgaacgccgatcgctagatctagataccaggagatggccaacatggaggatcaagcggctcggcgcgttgagatattcttttcatacatgagcccaaagtatcatagtaagaactggtcgctctaggacacacctgcttttatagatctcatatcccacaagtctgtagattttagaaaataccccgccatattccgcgttgcactgcttccaaagtacaaagtaaggaccgagaggactaactcccgagaaatagccggttcattttatgtttggatcttgatcctttaacattcgaactaactcatatcaaaaccagtctctcaatgaagtttctctgctatatttcgaataaattgaacatgcccgtcaagatgttagtctttctttatcgcaacctccgcctgacaccggaagaattcatgaagtactacgaagcacacgtcaaactcgtcaagaagctggcaggcacggatttccccctttcacatcatcgaaattatatcgcccgcaatacagtcgatattcccccggatggctttaccgcgcgcaatgccttcatcccggcgacgatactccgcgggcgacagccagagttcgactttgacgcctacgccgaacttactttcgcagatcaggtttcctaccaggcctttgcggccaagatctatgccccggatgccgctgcccagataactgctgacgaggatgaatttcggatcggttgaaggtgggagtcgccttggtaggggaggtgagagttactgtaaaatgaggtactttcttgtcggagctggtgatcggacttgtttgcgatgcatgttggaagtccgatgtgatcatgaggtataccttcggtgtagtatctttcaacatgagggatattctcaagaacctagtatatgcccaatgaaacgtctttcaagtataactccactaacattcctctatctatactcggtcacgtttgactcccaaaattgcaaaaggaccagatgcataaagccaagacatgtgaagaactcccctcttcgatcatgagatgatctcagtggcttgactcctcagcttatcttatggccccttgaaatggcacatgcttcggtcgcatggtctcggtgctacattggcattccatttatccttctcacaggggccgttcctgcccggcaaaccgggtacattgatatgtgtcagactgcatatccttagaccctaatcagaaccttaaaccagtataaaccctcacttggcttgataataccgctcagttacattcattaacacgagttaggacgaggggggtggatgctacaacgtctgaagatagagcttctaccgatttaatttgttccgggctcctgactgtgcatgagtaaagcatttcatatgacaatgtcacccatccccaaaagtctccacgactgattggtggagggattcttagtcccccacgaggacagataagtcgagttgtgacaaagggatcaagcccaatttcagaatgttacacacttgtgtggtgtgccatgctgttggcgtctactatccatgacacggttagtacagggtatatcataatcgggtcttcatagtgtggggaggatgtactgtggcgctgcttaattgggcgccaacctcatattgatcattggattcgccggtggcttgtcttcctgaatgtgacaatgtgcagaatcctattgatccccccgatatcaatagctgaaacgatgtggccctcttggtcaggcaggtcacccttccggtaacagggtactattgactgtttgagctgtggacaaacgggctgagtagacacaattactattgtccggttgctcaatactccgcgggggaagtcatttgtttgtcgacttctactataaatagtgaggtcatttccctgatgctcgaactcaacaaccttcatcacacaacctcgcttggccgagacaccagaaattttgtccacacactccttcatcatgcaatttgtcattcctttccttctaggcctgagctggctcgccaacgctgcctacatccctgccctgaggaccaaaagcactgagattgtatctcgtgatgctggagagtaccgctcggtagcatactttgtgaactgggtaagtttagaccatatacagtgtgtcactggatgaaattggggatataaaaacgtcatcatccaatcattcaattatctaaacaggaagccacgctaattaaactgttcaggccatctacggtcgtaacttccaaccccaggatcttcccgctgagcgactgactcatgtgctttatgcatttgccaacctccaccctgacacaggcgaggtctacctgtcggacccctgggcagacattgacaagcactatgccaatgattcctggaatgattccggagacaatgtctatggctgtgtcaagcagctgttcttactcaagaagagcaacaagaagctcaaggtccttctgtcgattggaggatggacctattctcccagctttgcaactgcctttgacaccgaggatggacggcagaagtttgctgattctgccacggatctgctgaagaacttgggattcgacggtattgatgttgattatgaggtcagtctacagttgccatttggagatgttgatgcttatcaatactacagtaccctgctaccgatgatcaggcggacaaatttgtcgatgcactccgacgacttcgtgaggtatgtgatttcttgatggatatccatgggtcctggctaatcaaattcaggctttggattcctacggctctagtgacgccggaaactatcatttcctgcttactgccgcatctcctgctggtaagttttatttccgtccttggacaattccaaaataactgacacaagtaggcccactccactaccgtcaggaacgtctgaaagagatggaccagtaccttgatttctggaacctcatggcctacgattactccggtagctgggacacagttgccggtcataacgccaacctccacgcctcgaccgacgacccggccagcacgccatttaacacggaccaagccctcgactattacatcggggaaggcgtagctgcaaacaagattgtgctgggaatgccactgtatggtcgagcgtttaccaataccgacggcccgggaaagccatacaatggcgttggatcaggcacatgggagaatggcatttgggactacaagggcctgcctttgcccgactgtaacgtgacagacttgggtcaaataggtgcaagctactgctacaaccaggacagccgactgttcatcagctacgacacgcccgagattgcgcgcatcaaggcgcagtacatccagtcccgcggactgggcggtggaatgtggtgggagagcagctctgataagactggcgaggacagtttgattacaactgtatgtgacgttcttttgatatatgattcaaccgtttactaacatatacacaggttgtggatacacttggaggtgtcgacgctttggagcagagcagcaatcagctgcagtaccctgactccaagtacgtgaacttgaagaacggtttcgattagattatgttcatttggctgtcaatattgcaatattggagatttctcgctgacatatgcattgggacatttaactatggctgttatgtgatggacgatgggaagtgcgcctctcgcttgcatctatctcgcacatttatgaagtggaaatactattaagattgaactttgcttgaattgtatggatcggatgtagtagatctagattgtgttgtgttttgctccccaacatcactctccacaaccattgtacaatacatagtgactaactacaaagtatatgtattctatttctcgggcgagagcaatttatactcaaaaataggaattcatatgcatacgagtataattccctttcagccaatgagagtggcctatagacaatattccgccatcacggcccactgtgatgctataacatcataccagagtgaccgcggggccgcggggttctttttcgattaaaatataacttcgtttctcttgtagaaggaaatagtactttgtattgtttcctagcttctagcccgaaatcaaaatgtcgactcaagtatcagacgagaagcctcgcaaatcgctcattctcaatgcctttgtggaaatgtgtacgaagcccattcataccacttatggagctcatctctgataatcattacaggcagcgggcatcagtcgccaggactatggcgccaccccgaggacgagtcgtatcgcttcaatgatgtcgaccactggatcgagctggcccaattactcgagtcggccaagttccatggcattttcttcgcagatgttctaggtaaataggtcaactgtggcatgttaggcgagaagtctaacaaatatctctttctaggaggatacgatgtctataaaggacccagaaacctcgaacctgctatcatctccggtgctcagtggccagtgaacgagcccttgtctgttgtcccagcgatggcggcggccacgaagaatattggatttggagtgacggtcaccacaagctacgagcagccatatcatcttgcgagacgactgtctacggtcgatcaccttaccaaaggacggtatgtgaagctagtgccagttttgagatcgagttgctaattaaacctttacagcctgggatggaacgtgagtaacacgctgaactcgaagaacgggttcctcaaaggaatatgtactaacaatcccctcaggttgtaacaggatacctcgactctgccgcccgcaatatgggccaagccgagcagctgcatgtaaagcctcacattccatattcacatatacttacaacccactaacaagaaaccagcacgacgaccgctacctcctcgccgaagaatacatcaaagtaacctacaagctatgggagtcctcctggcgccaagacgctgtcatccgcgaccgcgagcgcggcatctacaccgacccaaccggcgtgcgtcaaatcaaccacgtcggcaaatacttcaacgtgcccgggcctcatctttgccagcctagcccacagcgtacaccggtgatcctgcaagccggcacgtcgaaagcaggcaagactttcgccgcgcagcatgcagaggctatcttcgtggcgggccacagcccctccgtagtagcgaagaacgtcagggagattcgcgagcttgcacagagcgagtacggacgtgatccgcagagtatcaagtttctcgcactcctctgccctgtcctcggcaagaccgaggaggaggccgtggagaagttcaagtattaccgcagtctggggtccattgatggagcgcttgcgctgtttggtggctggaccggcattgatctggataagtatggagatgatgaggagctgcgacatgttgagagtaatgctatccggtatgtgataattctccttttcggcttggcagagactgactcgcgatttctgtagctctgctgtggaaggctggtctaaggccacacctgaagtggctaaatggaccaagactactgtcggccaacacatcaccgtcggagggctgggtgccactcctgtcggcacagctgctcaagttgctgattacatggagcgatgggtaaaagaagccgatgtggatgggtttaacctggtaagttgtgttattgaaacagtctgttgtcgagacaattaataacactattcgcaggcatacgcaatcaagcccggctccttcaaggatatcattgatctccttattcccgagcttcgcaagcgaggcctgttctgggacgactatgccgtgcctaagggaacctaccgtgagaacctatacggacaacccggccagtccggaccccatgcagaccaccctgcttcgaggtaccgatggaatgctggcgtggatgcttctgatgctgtcatcccggagaactgaatgctatacctgacatcatttaagaaattgaattgcaatgaccaacaaataattagaacaatcaatttttagacagactatccgtagattacctgcaaggcccgcacaggacctgttctatggacgccaagaaaatgcagattttgtacacaatcataaccaaagctctaagtcaacatgtcatcgagacgttcaccaaggaccttctcgatctgcttaacccatctacggacctctctctcaacactctcatcctcgtcttccataagctcactgatgtaaggcagcatctctggcagaagtgccagccactcctcacccagttgctccgtaagagcctgttcggtcttgagggctgcgagacgggtgtgggggctgtcgccaccagcgaagcgggcgttgggcgcagaggaggggcggaggtatttcatcagcgcggagttcagctccttgtggttatctgtggagtcggcggcgatggccagttcagtgattgtgggcacgacgtcggcaatgaccatgttcgaggtggtggtgctgtttgcgtggccgagctgggcgatcaaaggaccggaaatgctggcgagatgggaggggctttgccagaattctgcatagatgttagtggccgtaatgagctatattgggcgcagagggaacctaccatcctggtcatgctcgaaggacttgcggagcatacgaagggcagccaaccagagggacttttgggccttggagggacccgtcgtgtttagaacactgacaacgttctccaacacatagctggagtacccggtgacaattgactgaagaagatattagcgagattaatgtatggaaaaattgcgaggtaacatacctggagagtaccaaagaagacctcgaggaacttgtagaaagtcgtgaggcgcgaggtttgatcctgttcgctcttgggagcgccggtagtggcccattcaacaaacttgaggaagatgggccggaacgtgctgtcattcagcttgtagatcatcttgattgtaacatcattgagtgccacttcggcctcatcaatagcagtcgattcgaagacagccttgtcgccaagagcaatctgttcccggcgaagatcgaacgccttgaagagaatcttcgtaaggacgccgatgttcttcgcaatggccgacttggggtgcttgtcaacagcaatcgtgacaacttccaagagttcgttcacagcaatcgggccagccttgacggcgtgctgccaattccgatcgacggcgccgagagttgcgcccagatccaccttgcgggccatcaaccgcagggactcctggcggctttcatcactgctctcctcgatgtccgcattagcagacttgaaggacaggagaagcatcttgtccagatcgccagccgagatcatgaatggcaggtgagcgaaaagggcagagaagagggtgaagacggcgtcgtggagtcgcgagttctccttgccagggaccagactcaactcgagcaattctaatgaacgcttgagtgtgtccgggagggcaggaatcatggcttgacccagcacctcagccatagaggccaagcacaggatacccatgtagcgaatgcggtcatcggattggccgaggcaagattcactggcaaccactctagcggcagcaatgaccttggacgggtccttacggccgtacttgtcggtgatgcggtcaatgcacgaaacagcagcatgcttgagcagcgtatccggagacgactcgacaatgctaaccagggtgggcaagaagtcgagaacccggatctgcgacaggttgtcacgctcggggttctggcggaggcgagtctcgagcaaacggagaaccttgcgtcgaagttcgtcattgggaccctggagtagaacctcaatggtatccaggaagtcgacgagagacagagtgctaaacagagagccgaggacctcaccacaagcctggctgacgggcttcatactctgcacagcctcgccgatgctcagcacctgggtcagaactcgggagaagcaagcgcgggactgatcagcaaactcgtcgtccgactcaaaggccgtctcaagcttggacttgagagaagagtgcttgaacaagtgagcaagatcacgcaggagatcaacgcagatgctctgggcgtcgcgtccatcgtcactgccaattccaagaagaacctgagagatacctggtttggtcttgagagcatcgctgaccaagttcaagtacttgctgtaggtggtaagctctacgacagttgtagtgtcagagaccagaccagtcatcagagtgagcacatccttgtcggtggagtatcggttagcgagcattgccaaaacggcgaacaggaagtcttgtgttcccagcttgctgatcaaggcatggaagagtctcaaacggcgatgggcggggatgtgctcgaaggctgcagtgaaactgagcagtagctcggatgttccggagacaacatccctcttctggttacgcagagactggataagagcaggaacaacttggtcaatggtttggtcaatgaccgaaacagagtagtcatcatccttgcgtagaacggtagtgcccatgaacgtgaagatcggcatgacgctgtggagaaccaactcgggcgcaatgacagacagactacctacgagaagaagagcgccgttctgaacctgcgggctgtcggttgttcggacacaatccaccaccaggtcggccctgatgacggatgtatcgaacttcggcttaacagatcccttagatgtgttcacaatagccaagagacttcccaaagtcaggctgaggagatagctcatgccagactggatctgggacttgaagtgatgaagagccgctagagtctggaacaatccacctgcaagctcaggatgagtttctggggaggagctatccacgatctccaagatgaaagtcatcttgtccatcaaattgctaagctctgcttcgtccttgacagtcatcgcaatcatgttgttctggctagtacgtctccgcttcggtgctggaccaacagactcaacatcggtgatagacacaggaatcttttggacaaattgctgaagaacagcaccggaaagctcgacagtgcgaagaacgtcgcggcagttattcgccagagaagcggcattgaccgatcgcgaaagagagatatcgagcaacttctcggatgcagtcaactgacgttcttcgggaatcttagcccagatgtgtttgatttgaccaaagcaagccgcaacaaaggacgggcgcaaatcaccaccagagctgacattggagaggagaacatcgatggcgtccttgtctttggatgtgacaatagcagcaatcaaattctctgtctcagatgccacgatgcgctccttgccacaaatttcctcgacttccttgtcgctcaagcgacgccaatcctcgagcaccgggagaagctcactggtcagggttgcagtagagaccttctccacgctgtttaccaacttcagcaagctaatcttgggtgcgaacactggcatcttgacaacatgagagcagatgaacgcaaagagactaaggcggagagacttcttgagttcggatgcacccgaagcttcggacagaacgttgccccgaagagtagcttccaccatcctaccgacatggttagagtcaaggatagactcctccaaccctggaagcaatgcccgctccaaaatcttttgcgaatccttggtggtcagccatgcaacacccgtggattgcttgcccttgccgtagattgagtcgtgagcccatggcttcgagctgtcaccggaagtggtgttctttttgtacaaagatccgataatagccaagatgccagcagtctgacggcgaatccgttctgaaggatcagagagggctacaaacaggaatggcagtagtgcctgagggtcaaagtccgcgggtgccgacgaaagaacagatgatacaacgttcaaagcagcgatctttgttccgatggggtagtggccagcaacgactctgacaaagaaggatagatattgaggtgttttgatcgcctgggacttgcccaagattggcaaattggtgaaaagctcgagattgtcctcggagtccaccgccaaggcgaaaacgcgaaccaggttatcgaattcgatgatagactgtttggagaggaaggagtatgggaacaaggactctttgatcaaagactccaaggctggggtaaacgcatccacctggggctgatcatccgcatcgatcatatccacatcttcgatggcctgtgccacaactggggcctcgacaacggtctgaaggttgtgctctagcgccgagatgttgagcgaagattcagtcaaaaccttctggaaaataggttgcagagtttcagaccggttgaatccttgaaccagttcagcaagctgtgtctgggcatccaaagacattccgcgggtatcatctgcattggaagctgcttcgagaaccaggctcatagccttggcaatctcattctcaccaagcatcttgcgttcaaagacggaggccagaattgcaaggcgagcattgtcctgcttgtcaagatcagtcaagcaaccggcaatgactccaagcaataaatttgatgtctgatattgtggcgcgatttcagaaagttgggcgataggattctcgaggcgcaagatgcccttaaagacccttttggggattgtaacagtaggcttctgctgtgcaaggactgaaagacaaatcagaccagatatctttgtatcttctgtccaagaacccacaacactctccattaggccatcggtaacttcgttcgagaggaaggccttctgtgccagtacaacgcagatcatataggagccaacgatcaattccgaaacattcttcattgtgaaagcgttactgagtaccggcaaaatccgcaaaaggatatcttcatgcttttgcttctcggcctctcttctccccgagcgagcgccatccaacattgttgcgacagcctccgtgacaattccggcccaaaatgcaagtagtgcatggctttgggcctgttgcctacaaactttcaggacgtattcgtttaattcggaaaagaaaggcttgttcgtggctgcgctatgaacaagcgggtgccttggtggattaatgagaccgttcttgtatggaataaggactttgaatgctggcgtaagagtttccggaagaatagagagaaggttcaagaagagcggcgtcgtatgatacggcaaaaacgtcaataatacggcggttgtgttgaactcgtggatcctgtcacataagtcagccaccactcctcacgatctgcacctcccctcacaatttattcttacctgaaccttctaacaagccaatccacagctttcactgcaggactcaactggagcctgccgccaaccagagctaggaaagcttcaaccacagtatccagttctttattctgggctacgttcatctgactgcggtcctccgctttgctctgctcgctgaatatcgtgcgatcaaactccgtaaaccgggggtccaacgagcataactcccggaatccgtcataacaaatatcatagatcgcatcgaagtcttgagtgccggcgacttttgggtcaaaaataagtgattgtgagtgtaacaccctttgcgccttaaggtcaagctcgtgtgccgacttggccgcaatttgcgacagctgcgcggcgagagacgaagccattgtgaagtctcttttggcgggctgttccgcggacttttcttgttatttttgtattggtgctcacacaattgcacagtgacccatatccctaagacttttgagggtagtctttctttttctttgcgaaccgagggcaggttcaaacaatttgaggtaagtcttcagctttgcttgaccaaaagcaaatggttgacttttttttttgccagccatcccgaccgcctatcggagaatgattcttccgggttatcagaccgcggcgcgactcgataaggaagatcgagccaccacgatggactcacctgggtctcaggttagttagcctttacttacatcttagtaaataagaggcacagactgacgaaaataaagggtgtcccgcaattctccagcttccaacctccccctaccgctcctccggcccccgctaccggctcggaccatgaacgtcgccggcgtcgctcgcgccatcgtcgtcgcgcagaccgcaaagagtctccacgctcacgtcgccatgaaccgcgttcggacggttaccgtcaacaggcgacagatgaaaaatttgagaagcgcctgagtggggaaggaattgccgatctaaacgctacaaaagatgagccgaataaaggattcgtcgtcgacagccgcggcgatcgcgacaatacacgttacggcgtggatcgttacgaggtccctgcataccaccgcaatggcaatggttttgtacttgggctccccggccagcgcattgattaccaaacgcgatatgaccaaggccctcttctccttcttcgccccgactcaggctcgtcaacctccgcagtcaagcccctctccgccgaaaccctgtctgctttgtccgccaatcttcccgttcgcctccggtctgatcttaatgccaaccttgctgccgagaactcacatacacaaaatttcatctcaacaacagtcccatctcaatccggcgttgcgacaactgccaacctagatgatgaaccaccgtcttatcgctctatcgagatcccggataaatccgaagaacaagcgactgaggatgatgcgaagaccttcattcgtcttgctgtcgaagctgagattttgaatcgcaatgccaagttgaacagcgcagtggcacaacatcctaatgatattcaagcatggatccgtcttgctgagcatcaagaacttgccgtcaccggcgggacatctggcgatcggtcttcctatcgcgatcatatacaacttgtggcaagagccaagctttatgtgtatgaaagagcgatcaaggccaacgcacaaaacccagaacgcgatcatcttgtgctgggccgtatggaagaaggcgcgaaagtctgggactccacaaaactttcattggaatgggacggagtcctccgccgtcactctgagttcatcaatatatggattgagtatcttgactactgtcagactgacagtcaggattttaactttgacacttgcttcaagacttatgcctactgtttgaagctacattcacgtgtcggcttcgggccgcggaaaactcttatcaggtcatacttgctgctccgtttgaccctgtttcttcgagaatcgggccacgtagagctagctgtcggtatatggcaagcggtgctcgaattcacatgcttccggtcagcacatctaaagggaaagagagaagaggccctagttgagtttgaaaagctctggaaacctgggcacatccggattggggagcctcattggcaaccctggaacagtggacaaacctcccgtccctctatcaacgagcatgtttacacttctgaggcgaataccacagagttgttcccatcctgggtacgtgcagagagagagcggatgttcaaaaatcgcatgccgtcacatgcctttggtgaaactggagagaatgacggtttccgagtagtccttcttgaagatctcacgcagatacttccttatttcttggatttggaagaaagccttggttccctagttgatggcttcttgtatttctgccatttgcctcacttgacaatgcctgcgaatatgcacaccagccggctgtggaccggtgacaatttcgtgcgaaacgaatatatggatgatcctcgaaacacaatcgcggactggatcacttttgagaagtttgcctcaaccacaagccttgcgcctttcgcattccctcatcagaccttcgttcacaccaccgatactcttttcgccgatccaaagctgtggttctctgctttaacgaagtgggctgcaaccacctctcattcttcctgtgtcatcgatcccgactttgtaatcttgactctccatgcccttgtcgatatcttcaaagatagccaattggctgaatacgctattgcagtcactttcgcgtgtgacaacgctctgggcaagaaatacggaaagagactcttgaaggaacgatcatcaaatctgagactttataatgccgttgcgctcatgtattggcggactggcgatcttgatgttgctcacaatgtgtggtccaccgctttgtctatgagccagaattttgacgcccgcgagctcactgactctgcacttctgtggaactcttggatatgggaaatgcttcacgctgggaacaagaatcgtgcttcatacctgttgcaggccatgccttataatcgagtccacttgctatcatacgacacagctgatgaacttgaaatcaatgaaaccacttttcttagggtcaagaaggcaagttctcattcgttgatctcactgaatgctgtcctaaccatccacagtgcttgtttgccgctcagaggaatgccttgaagttcaagaaaatgcaagcatatgtagcttacgtcgactgctatgccatcgccctctatctcatgggcgagcagcttgaagaagttcttgatgtctacaatgacgccgccacttctcttagagtcttacccaggactgatgatgattccagggtgtttggcggagaattgctacaccaagcacgagcacggatcatttaccactatgtggagaagcagagtggtcaattcagacccgctgacattcgtgcgcagctcctggatagcctggaatggtggcctcacaacaccatgttcttgtcgctgttcaaatggaacgacgctcgtttgaatctgagcgatcgaacccgcgatatcttcgacgtcactatcggggcgaaggccagggccgcccggcatctgcaagggcctgccccaatctaccgtgtacccgtcacaactcacctttttagcatctatgctgagatgggtcgccctctcctactcggttcgaccgcgcactccattcgggcagccttcgagcgggcgattggtgatcatggcatactcccgatcgggcggaccccaactcgaaagagtccttttgagctggcgagctcaacctccgcgcggaccagcctcaccatctggaggctgtacattctctacgagctgtacgcggagtacaacgtcggccgcgcccgcgagatcttcttccgggccctgcgctcttgcccctggtcgaaggagctgtacctactcgccttcgagcacttgcgggcggatttgaccgaccgcctgccccccccccccctccaccggccggggnnnnnnnnnnnnnnnnnnnnnnnnnnnnnnnnnnnnnnnnnnnnnnnnnnnnnnnnnnnnnnnnnnnnnnnnnnnnnnnnnnnnnnnnnnnnnnnnnnnnnnnnnnnnnnnnnnnnnnnnnnnnnnnnnnnnnnnnnnnnnnnnnnnnnnnnnnnnncgggcgtatttgcccgcccgcctgccccccctcagtctcaaccggcagggagaggtcagctcgtcggggttcaacgctgcagagcttcgggctttgtacttggagatgctgcgtcgtggactccgtattcactactacttggaggaccctatgggccgagtaggcccagagggggtctgatactggcggctgggcggtggaggaggagaggggagagaagagtggagaatacaagaccatgagcgggtgaagggggtgacctagatgggataaaagtaatatcatccaattcaaaagtaaaaaccccgtgctttgctcgatatccgggggtctagcagcgtagcaacgtagggagtctcgaatcgatcacaactttggtccaaacctcggacactttccacactaaagtcctggatgaacaatctcctcacaactgcagaatcattgtgccactgagcggaggacgcgaggtgggaatttgatttttaccaatcttgcggaccttcatttagtctaggtatgtcaatataaaacagcttctcgtgaacttcatggcaggcaaatgggacaaaattgtagttacaatgggcctactaaataaaggagccaacatatcaatccaaatagagtaaatgccatcgccgttatataatctttctttattagatacaactatgcttcctcactaaagaaccgattcttaggtctcggtaggccaaagtgctcacgcagtgtcgaaccggtatactctttgcggaaaagacctcttcgctggagttcaggaatcaattgatccgtcacctcttccaggccctgtggcaagaacggaaacgtgcacgtgaaaccatcagaagcttcctcgcgcaaccagatctccatttcatcggcgatatcgcttggcgaaccgaggaatgtcagccctgagtatccaccatatcgttgggcaagctggcggatcgtgagtccctctttcttggctagcttttcaacggactccctgctcgtcttgctcgcattggtctcgggcagatcgtctggcaatagactatccggatcaaggccactgacatccactccaagtgagattgacaaggaagcgatggcactgtcgtaatgcaccagactatccaacttgagtctcttctcctgcgcatcttgcttgctatccccaacgataatcattgccgcgggtaaaattttcaagagatctctcttccgtccggccttctccactcgccccttgatatccgcatagagtgccttcgcactatcaatatcctttggactgcaaaacacaacctcggcagtctcagccgcaagctgtcgtcctggctcgctttgcccagcctgaacgataactggccatccctggggtggcctggcaatattcaacggccctcgaaccttcaactcatcaccggaatggttcagcacgtgcattttcgcaggatcgaaatattctcccgtctcgacgttgcgagtgaaagcatcatcggcaaaactatcccacagcccggtgacgacatcataaaattcgcgggcacgcttatatcgatcaccatgggccagatgctcatcgaagccgaaattatggctcgactctgggtttccggtagtcacgatattccacgctgctcgcccaccactcaggtgatcgagactggcaaatcgccgggcaacatgatatggtgcgtcgtaagtcgtactagcagtagcagcaagaccgatcttctccgtcacggaagagagagcggagagcagagtaaatggctcgaatgaggtgaccgtgtgactgcgcttgagagcttcgacgggcatgttcagcacggcgagatgatcagccatgaagaaggcatcgaacttggcggcctctagcttttgggcgaactgggcaatgtgtttgaaattgaagttggcgtcgggatatgagcccggatagcgccatgcacccgtgtgtagcgagactggccgcatgaaggccgtgaggtgcagctgacggttgggttgcgagtcggtcattgtggagttgatttgggtatcctctaggttggatttttcaatctttccagatgtgattcatacaaataggttaattagaatcgctggggttatatactctgtaccccgcctgttgtggcatttccaagccgatttataagcctcgctcacttggccttgatatggcgtgcttagagctgcgtaactatatatagctgtgtatagttgtccaaccattctgaggtcctcatttatcgcaaatcttatactttgaaaccctctagtcaagaaaatattgaacgaggggtaccctctgttgaaattcaatctgctgtctatgtagaatgacacaataaaaaaatccaaaggaagcaaagaagaagcagaaaacaaggcactcggatgcatggcagatcaaatacctgcgtacatacgtaggagaattctagacctcatacaagccaagcaaagcaagaaaaagaagcaagcaaaaagtcgaaaagacgaactccccttatctgcgtaaacaggcagtggaatttatcgcaaccgaacctaagtggccccggttatctctttgatgtccgcaataagatcctcaatgtgggtgaagttggcagtcagtgtttcctcccgacccgcaaaaagcaagccgactaccacatgatctcttttggtataaaccaaggaaccggactctccaggacgtgcaaaaagacggaaatcggtgccgctggctatcacggtatgttccaccgtcggaacagaagttttaattccatcaatcatttcgtgcttgacatgagcctctttgagggagtagtcgcccccggagtacccggagcgttgtcccgaaaggcacagccttaagttgtcgatcttgtcaggtaggggcgatccctggagtacatgccgcccgggagtctaatgaacagttagattcagcgtatatagtaaggctttcttccaatagccaaactcacgacgttgctcgacaatccatcatccggtacctcgaccaagccccaatcgcagttgatacggtgtccatttgcaccctgtcttgtcctgagcccggatgccacccagacactcccgaatcttgggtcaaaatctttgatattgtcaaggaaaccccgcaaataggacaattccttctcgttcttcagatatttggttttctccgttggtcgaacattctgtttatgggtaacgagtaccccagagagctggtgagccgatgtgtcgattttctcaatctcctcatctagcgcggttctcttctctcggatcgcacgagagctggggtgatagactgtcaaattgcgtgaacttgtttcattggggccgatgccgaattcgggccatcgtctgattatcctgatcgtcgcccgcggcttaccctcctccgttcggttgatgacatggaagcatgttacggtaacaactttctgtgtgccgtcgggcgatgcggaatatattaaagtcaaggccaatgtttaagctggagctccttggtaattcttgcgtgcacttgaagatatatcaaaggataggggtgttccgactccaaaggccaaaattgaaatggaagtcgggatttgggatcgtgatttcgaaattgatgtgaccaagctggttttcggatagattttgccagatttggcgacaggcttgtacccaagtgtcgctaaatgtgtcacgagttgcagtgatgatcaaagtcggcgcgggttccttaacctttagaggccagtatttgtattgacattttttgatcttgatggatgttgcattgactttgtactgaccaagaaccgaaagaatcattttatgaactctgatggtttcgaaaactgtccataaaggggacttgccgtccagattgaaaactatcacgggtagggaacagagatatggccctccagcgcgattttgctcattgatgaatccatctgaatcgacctgccactggcccgggtcgtgaatactatcgcagctggtccgaacacgctggccatctcgaagaggagaggcgtatgctgctaggacttgggagcttctcctcctcctcctctgattcagcatcatgctgagacgatttatcaaagctttcgatggaggacgattcagatttggcaccagaggagctattcgaaaccgcagaagagtacccatcagaggagccaccagggaacgtgttgagcatggcgctagggtctttctggctagagctgggggtatgaaattggtcgttctcagagcagctgtcacataggatgccagtttgaacttcactaccacggtcatactgagcagacatgtctaataaagtgctagtgctgacttcgagattcttctgggcaggcgggccaaacgaatccccttctctcgatttaggttgtatcgcaatagaagtctcagttgtgtgccactgcacaggcacgctggtttcgatgtcacagttcccctcggcagacgggtcaggcatgatgacagtgtcagtgtcagtgtcagtgttaaactgagcaggtatatctgacgaagcgctagctttttcttgagtaggcagttcaagcaactctatgggtagaggcttgaggctcatctctgtagaaatctcagggatgattatttgaaggtacaaatgataaaagtgaagtgatgtagaagagaaagaaagtggagtgggtggagaagatatgcggctcgacggccttggtaaaccttaaatttggatacacagggtcacgtgatgaactatttgtctcacaggggcatcctcatccacaacacacccaaagcgtctcattattagacccacaattttcccaatagcctgatactcatgtgatcaagtgctacaaactttcctaggaggaggtagtatcaggaccatcgcatttgattgaacatgtaccgacacctatccacgcgtgtttggtgctacgttcgtatgatacaaggcccaaagcaatattgccagtcaatcacgaaacattcacgcatgctctattctcactcaggtaggtatgcctgcctaaacgtgatttaacattcactcattcgtatcagactggaattctgacgatgaattctttaaattcacgcgtagtcgctttcttgtagacgaggcggaaaaccttcgaaggcgagagatcaaattcaacttgaataggctcgcaagtgttgcggcggactcaatcggcgctgctcaatgcatttccatcatcaagtaccccgacggtatgttcaacaaaacattccttatgacgatggaagatggccgagaagtcgtagctaaggtgcctaaccctaattctggtatttcccactttaccatggccagtgaatttgccacgacggacttcgtaggtttatttgaaactcggtcgacgccaaatcttgctaatgcgactggattggggggctcgcaaaaatcctcaacacaccagcacgtcatgtccaggtatggaactcgcaagcaaagtcacatcctgttggggctgaatttattatcatggctaaaattgagggtatcccgctgtcccaagtctggagcacgatgcaagtacactagaggcttaaagttattcttgccatgacaagtttgcgaaagcaatggctcagcgtttcattctcacattacggtagcttgtactacgctagagacgtgcagttcccagcaggcaaccactatgtcaaggatggcatggccgtcaaagattcagagtttgctattggccccgctactggtcgggattggtttgatgcgggcagatcaattttggatattgaaagaagaccatgtacgtcagagtctgtattttctttctctcagctgctgacgagttcgtaggggcttctccaacgcagtacctgcaagccgtcggaacgcgggagattaaagcaatccaatttctgaaaccacccaaacagactgccttattctgtggcccaaagctccaccaaccggacgcagaaaagaagcttaccgcgctagcatggtaccaaaagatcgtcgatgccattatcccaaaggacacctctattaccaacccatatctctggcatgatgatttgcatgatgacaacatcttcgtagacccagacaaccctgaaaggattacgggtatcattgactggcagtcttgccgcatctcacccctcatcagccataacctcgatccagctttcctcgactgggatggccttgagccagaaacgctcgatctagcaccaagaccgacactcgctaggctttcccccgacgaacggtccgcggctatgcacgagtatacagttcaaaatgtgttcattggatggcgaaatctcatgcgtgctaagaatccagacttatatcgggtagtcgaattccgaaagacggcagcgttcggactgatatttctcgcccaccgcatgttcgaatacggtgaaccgcacttcctatcgcttctagtcgatttgaaggacatgtgggcggacttacccggcgtcattagcgacattccattcccatttgagttttcggaaacggacttggagcgcatcaagctggactgcgataaaagtacggagtaattgtcgtagtggcctgattcgtcgcccgtagtccgctgcagggttaccataagttataacttagggcaggcttcgatgcgcagtgttgatataggtcataataaatgccatggtctctatttattgtctagagagtgctatatcggttctgtttcttattggatattattcaaagaacattgtcaagtctattgccatatattcctaccacccagcattcccaccgtatccacgtatattgattgcttctcgccgctcgattcattcatactctcaagatgtaaaatccgtttagaagagctaacatagagagttcatgaaatcatagaaaagtataacaaaaagagagattcgtgattcgtgtcatatatgatagaacaaaaacaagaaaaagcaaaggggcaccagaaacaagactagaagtgttccttccagaatttgaaccggacatccctggttgatgaatatttggccgcatcgctaatctgcatggcagcagtattaggaccacagaaataaacaccaatttcggtggtagcagcgctctgcagacccgtcatgtaggactggtccagcaagccaagccgcatagccgtgaagagtcgcttgaagtccggacgaccaaagttcgtccgactctttagctcggtgagagggtcaagggcctgcccgacagagttgaggtagatatttgcagcggtatcggcgtcgagacgctgtgtgaggtaggtgtggatacgcaagaactcggtgcttccctcgctagcagcggtgttggcggattgggcttcgagggaagatagcagagcttggaaccactcaaatgacgaggtatccttacagacccagataaactcaacacgtcgcagtcggcgaggagggtttggacttgagcggagatgccaaatgttcttgagaatagatgcccagggtgtgacgccgatgccggtgccgatgagcacggcgatttcgttgtcgaacacgtcttcggcgggtgcaccatatggtccatcgatgcgaatggagggcatggtctgtccgttctgcagggcaacttcgtacatgccgttgggatcgagaccttcaaggtctttggcttgggcgggaccgcaaccgagtgcatctccaagtgctcgggtgaaatctccgacttgacggacgtgaatgctgagatatggatcaaaaggacaggaggtaatggtgaatggatgccattgggtgctggaaacatgaggcacttgaaggaataaccattgtcctgctttgtacttcatgcttggtttgtggaactggatctccatggcggctgaggttcttttgttagctgaggtcaattcaacatttgcgagagaagatcataccataaggatggcgaatgacttttgtgatgactgtcacgcgccgggatcggatctccctgtacagtcgttcgaagagatacaaagttccaatgaccaactcccatctccatccttcatagccaagacaatgattccagaactgtttccctgcgaaaggagagatagggctcgcggtatcccggacaaagcacccagtggagtgggtgtagagagctagcatgaacggaataaaaaggtgatgcgcataccagaaggtttcatatgcttgttggcggatgcggtgatgtgcggttgtatacatgagcatcatgcacaagagcatgacatggccagtgataccacctgcgcgagcaaaatggatctccactgcaagttctgggcggagttgcctcttttcgatgtggtagaagctacttagtgtcagtaaagtacccgcgacaagctgtatgaggaagcagcctacttgacatagtgagcagcagtgtgaatagccgtgaatactagtatagaataagctatttgccgatggaaccacgccgattcatctagtggtagccatttgatctgtggtctgagccatcggaggacgttccgacacataggaaataggattaaagtgcaatcgatggaaagaacgagacctgcacctcgcgatatccagactgaatagccaagtgtatttagtgacgccaactttggatttgatgcctgcaggtacctataagaatgtcagcaacaagatctagaagtagaacatcagaatacataccatcctgcagcaaaaatcccaatatgtacaccccaaaagaacaaatggaacaagaccttcgaaacggtcaagttcgccctcttccaccaggaatcttgagctgcggccattctttctctgtgcttttgagaatgtcgaccagcgacaagtatttaggcaataaactaatcaaaggagtgacgggtccagacggttgaccagcaacccggtaatatacactgaaattctgtcgaaagcgaaatctcctggctcccttttgtggcaagactccagtgtcaattttgaccggtcggtgctttcagagttcgtcaacggcgttgtttctccatgaatttggcgtaaatcaagatttcctggggtaattttcgcttcgaagttgaagagcggatttgaaaaaaaatccaaatactgttgaacgcctcgcacaaggaaaagtacgctcgaaacttgtgatagtactcaatcaagatgtatagaaataggatgtgagttgtgcgccttgtcgcgagcgctcttgccgggggattcccctgcacgtgtcctctcgaataaaagaggttattgacacacttgagataaatatgaaatcgatttgattcaagctggtccagacatggttgacgtcaatagatggaataagggcaagatcggagatgggttggaggttcagagaatcccagtgttgtggttttagctgcagggatggggggcagccgatctataattacatcgcttctggcgggcaatactccgtttaaccgactacgtacacgagtctacaatgtctgtgcttttagaattctcctatgaatgagtggtaggaagaccaagagaggaagtccagaggctagaatcttgatcgcttgaaaatcctcgttagtttttgcctgttctctcccgactgctgtcttggctgattcttccaagcctttcaaaagccctgcttttgatcctgggcctgggattttattaatactctgagaagtgtgctatttttaatgaccgttcgtagcaggtacaccaatcatgaaacgaagtttatacgccctagagtccgaccaccgtgccatgttccccgcgaagaagcgagtctagtgggaaaaaggaagcaccctgttcgaccaatcctatccaattcggcagttttccctgatcataacaggcttgaacaggtgcaagctaaatcggtcgccgaagttcaaagagattaatggcccgggggtggcagagaggctggtgactgggcaacgtcaaactaggccagggaaagaaggttgctaagaggttggcctatcagaggcctcctgcaagcgctgttctctcgtcacacggagccccgagggtcgcccagcgtcggtgaaaaggcaaaaagcctgccattctgttcaggatccatacggcggagagaatagaagtttcgccaaatatagatcagtgatgatttgaactatattgcgtgttttccataaactataccttttttccgataaaattctccacttggcactgcaagttaaatcaggcacgggctgactctgcagaagatgcagaaagacggtgtgttgcactgaattggaatcagggctactgtggtcatctgatctggatgttccaaacttgtctctacaacaaaactgagaccatgcagacaaccccggacaatccaaaaaacacaggcctcggttcaaatccccaggaataataaaaatacaattcgaatgtccatgagacttgaaaatgaaagcccctgtgcgtgccatgcatgcacctgcagttcatcacgccaagcccaagcgctctggcctgtgatttgccgacatccacttcgcgatccgctccgtcacatcctccgctcgccaatcacacagacttcaacaagctcaggaagaggggtgtcaaggattcggggacctttcggccagtgattggtctacgatgcttgtatctgtgcggatcacgctttaatcctatccttcttgcatgtgtcccaaccccatgcagctcgtcaccttttggcgctcgaccatcacatcctggcaaagtgttccgagtttgtttgagttatcagaggggtgatttgtctaagtatagactcttatacctaaccccccgcctgcacgcatgtcactcggaacatactttttttttcttccccatacgaactacggtaccacgataagcccttgcaatatatccgctctccatgtgctcggattatccaactcaataaacatctctatgtcttgctggatcgtatgatgaagtgattctctcacagaatctgccgcaactatttggggtttgcgacatctgtcgcccaagattagccttgcactttgtcacacaagtgactttatttcctccgaggtcttcgctagctaaagcttttccacgcacaacaatacagttcccatagttcaacaaaatgggcaggctcatcaagaaccactgggggcgcttaatcatcctcaccgcagcagcttgtacgttgctatctaaacccccaagtcgaagccggcactgacatattcaaacagaccaagtcgccagcgctatcgagggctttatctggcccaaggtattctgggactttatctccaggaacctcgatgcggccgtcgccccagtacccgttcttcaaatcctaaatctcgtcatgggcctcgtgggcatagcctgggaatggcctctcaagccatttgctggctcactaccgcaccgcagcattgaaatccgtctcatcatataccccctcaacgccctcctcgcggcgcttctctatcaaggcaccgaccctgcaatatattatttgattggcatcggtgtctatttctgggcctacagtgaaggcgaggtatgttgcgcatatttttgacataggttgttcttatgctaacgagtggatataggtcgtctgcccggagccttggaccttgccgaaacgacatggactatttaaagcataacattggttcagtctggtgcattgagtgtagcagacacatatcatttagatatcctaatacataatgaatttgatgacttgaaagagaagcatggcttgtatcattaatctccatcatcgtcatagagaatgcgtggggaatattcctcctgcagaattctcaacttgcatagacctaaattatcattttctccaattgacagtcataaaactgttcacttctcatattctcatcatacgttgatgccttgtcaaggaggcataaacacgtggacgacccacctggcacgtgataccctattcaaactccaagaaaaacgtcatcttgacaataatactttcatgaaagctcaagaagatccagaagatacattataaatgccttgtgcatcgtttatatgtcatggacgactttagggctgcttggaacccgagaactaaccaaatctgactgacaccaaacaagatggctccgtctacagaaatccaatccaaagtcgaggaagacgagctcgcccttgaaactgtcgaggatgtcccagtcaacaaactcaccagcttcaatggccgactgcagcaatacctgcatagcgggaccgcagcgcacgaagccccaactgcctctcggggtactatatcgcaacgccgcataaacaccaagaccgaatataaaccagacattaccgaacgtcaagcaaaagccacaatatccagcccaaggcgcaagagaacagcgtcagcaacctcatgcaccacccgctcaaagtcgaccacaatagccacgcctccatccccaatcccacctcgccaaagcccaaacaaacgcaagcgcagcacagcaaatccccaaaccccacccatacccgcaatcgccggcccttcagcgacagaatccctccttcgcgacacaatccccccaaacctgatcctcctactcgtaggcgtgaatcccggaataatgaccggcgtaacggggtacgcctacgcgcatccgtccaacctattctggaaactgctctattcatcagggataacaagtgtccgccaaatacccgccgatacatacaagcttccggcgctgtacagcgtgggcaacacgaacatcgtggagcggccgacgcgcgacgcgagcatgctcagtcgcgcggagatggatgccggcgtgccggtgctcgaagcaaaggttgctgcgcagaggcctgaggttgtttgtcttgttggaaagagtatttgggaggctgtttggcgggttagacatgggagggggattcggaaggaggagtttcggtatgggtggcaggcggagacggagaatatgggtcgggttgatgattgggctggggcgccggttttcgtagctacgacgactagtgggcttgcggcggggatgaagccggcggagaaggaggctgtttgggcggagttgggaagttgggttgtgaggaggaggggagagagggggttggatcctgtggtggttaaggaggaggtttgatatgggtttgcgattttctgtggctttcatttgtatagatgatgtcgctgtaccatatactatcataagctatgaccattgcttttaaatatattgaacggctttacaaatgggaatgttcgggattaagttaaaagtatttgtatttatttgtaagacgagtgaggttgctcatcattcattatctcataatatcaggtgcagaagcctgttgagtaccaagatgcaaagatgcaaacccagaaacagcaaaaactccctctaagcccattccagggctaaagattgagggtgttgcatgacgtttccccaaatgatcaagcgccaaagtgccatacaacggacgatcgagggatgtgaatatctcagtagaggtcaatgtgaggggtaaaggaagggaggtagttgtccagggcgtggttcaatagaacatcgatgcctggctagcctccccattaaccccgaaaggagtagagggtagatttagcggctgccgttggagtcattcttgccgccctcacgctcgcgtgcctgttgaagttgagttagtatacagaacctcgcaattgatgcaccgaagtggaactgaaacttacagtggaagcctggaattcgccgccttctaggatcttgaccatgcattcatcctcgttggatgtaccgaattcgttctgaagagagctcttgctggcagtgtcaaggacgccctgggctccgtggctgcatccagatgttaatgatctgacgtatagtaaaagaagtttgaaacacttacgagtgagtcaggaagatcttccagccattaagaacttcggtcaggggaatgctgcggtcgctcttccacttctgtagactctcgatatcatccacaaagacaacgaagtcgtctgagctacccttgtagaagatcttagaagcagtgtcgtttccgcgagccatattgaaaggatgtgaggtttgaggttgagagattgaatagatttcaagatttgaagatttgaagatatcagaaagatattgatgaatgagaagaagggaaaggtaaaaggtggtggtttaatagtccgaggtgggagagctcaggtgatgatgactgatgacgtcaccctatgagctgatgcaaatagaagaagctcgcgtgttttgttcacgtcctctgcagtctgaatgggacaactaaccacaattagtcagagtggatagggcttaaatggcgtttgtcgttctagtcccttgcttcactacagttcttacacagcgcgccaactattccagcaaagacgacgtcataggagctcccctgcccgctgtcggatccgctgtgacgccaaacgtggggtagttctgaaagagccaagtggcaagttggaggataaagaggactctgctggtattccaattaataattacttatagtccaagccacaattacgtttttgggttaattataatccctccttgacttcaatgctcccgccgaatgtaccagaaccatctcaaaaggacaacgtaaaaataggaacctcactcagcatcggagcgggtctttttcagcttcttgggtgccaaggcactaaacagattcttcggagatgaccacttttggggagacgaccacttcttggatgacggagatgattcggaacttccatcttggctccggcgcttgtcgctgcgaggtgaagaaacagacgccgtggggttcttaggtgagcctttgaaaaggaacgtcttcgaccgccgaggcgtggtgggcgtccgaggcacctcacattcgacttccttatcctcccctatctcgctgctacctgctgcctccttgtccattctctcgttctcttcgtccgagtgcatgtccgtcgattctgctctcgaatggaaagccccgacggagctcgaccgcctggtaaaccctggacgaaggctgagccgtctcatgatcgaaccacgtcggaagagatcaccccttccaagaaccattcctggcaatggaaggaggtctcctgtgtagatgtctgagatcagtcgctccagccggattcggtctattcggcgagcagtcaatgtcaatgccgagcggtcagtagatgtcttaggccgttcaagctcgccttcagcctgtgaggctgtttcttcggtgtggcgtgggtcatttgttttcttgatgactacatgttggacacggaacttgcgggagattgccatagaatccatcgatgacctccgcgccatagaagacactgtgtattgaacgtggtccaaaggtaacagttggagggttaagaaagaatgttttcttggttcccacgtcctgggttgggccacttctaccaaagccgccgacattttgagaatctcagtattccattgcttttcttccactgccgatgatgcactgagaacaaattcgtagttctcatctttattttcaaacaggagcttccatgaaaatatacatccgtatgagcacagtcctgatgggttagatatcggggataaatctcagcggaaagttactcacctcgtccattttgaagcgtatcaatcttgagagagtctagatagacacaagccactgcttccagtcgacgcaggtcatcaatccccttggcaaagagaaggtagcgttgaaaaagtacacagaccatgaactccccgttagtggtgtccattgtttgatatgtgacatggagcacaccgcacatgaccaacgggccaaggtctttgtatatactctgaagtgcatgctgcccaaaattcagtcatgttcatctcatcaatgaagatcttgtgcctaccgattccgagatatccaccttatcctggagaacgattgtcttgtcgatacgatctttgttgatcgggtttccagctgataaattgacccgtgttactagcaaccgtatactgtccaacacttgctggattccatcatgagaagacggacaatcactgacaggagtagacctgagcagatcttgtaggacaagggggtatttgcaaagacgttggatgggctatattccggttaatggtcgaagcactcatcatatttatctcacgcaccttgattaacaaatcattcaatgtcattgatttgtggtcctcttgtctgcgtcgctcagtagacgcgaccgatttcgaaagtgcctcgattccctgatcatatatcgtccagttggcaattgagcggcgtaggagagcaacatcctgtgtcaatagttcatagttgctgcaaaattggtcatacgctgggaatgaaagtgcctataaaatgcccagtcagtgcatacaatcctatctagtacaccaatgcttaccaatttttcaagttcacgggccacttccagtccctctgttggttcagcagtgagtgccatgaggcgctgattgaccgatgccttgagtgatcgagtcctcaaggatcgttgctgaagtccctttaggctgcccagatcaagggaccctatacgtttagtgattccgcgagacgtaagctcagaggcacctgcctgttgggcctgaggtgctgacatgggagatgctctctgaagttggttcaaaaagcgttcatgtattcccaaaatctcctggatgttgtcatagatctcgcgtctcgtatcgaagatcgtaaggatctatgtgtttacagagcacattagcatcaggctaaggaatgacagtcagctcaatggcttaccccgataagggccttcagaccaagtacataatcagactcagtctcaacaagttcctgtaggatatgacgccgtctggtggcccgtgtttccgcagcctcatcagtattctggcttaagcttggccgagagctgtcaccagaatgacgcacacccgatagtgtactctggtttgttgcgctttgaatcgttgtcctcgatcttatcaagctctggcttccaatgcttgctgtggttgttttgacggttccgaggtgcgatgagtcggatgcactcgactggtgaccttgcgagccatgggaagatgaatctgaccagccctccacatatcgccgttggcatgtgggagattcgtgtttccgtcctcggaagctatctatccatttcttgaatggacgagaagttgacttatcggctagagtcaccccaccgccgctttcgaacttctcttcggactcatcatttagcagggcttgcttctcgatgttcatctcgtcctggtcggccatggtcccaaatagcgatcccgcccaatgaaatacaggactcaggttccgagggcatggagaaagaaaaggcggacctaaccgactacgcaaaacaacggaatggaacttcatggcgagggaagagcaacaaagtgtgcctgcctcgtctacattcccgacgttggaaagtgcatgtatctaaaacagaggaagctgccactatccaggcagtacagagtagagacagcgaatttgaattccatccatgtacgtcatcaggtgaggcagcagtatagctagaattgaaatagtgcattttgattgttttatattaggagtaactgagctttttttttatatcaaacatccaagtgcaatgtcctgaaagtgaagcttacaacttgaagtccacgtcgtatacttcgagtgccaagcatcgccgcttatataaaaaagtgggagctccagggctgcccaggtgccacccccagacccacttgacgttcttctcccactttctttctttgctcaggaaatcatcatgaacgataacattcacgccccaactgttgcctctggaccgacgtccggggtcactccccgcgatctgtccaaactgtcgatgccagatctgatgcaggagaaagaacgcatcgaggcggaattgtcagctcttagtagcgtcctccagtcggtgagatttctggcctagaagttcccatcgcggtttctaacaagcatttcgtgttagcatggagtccgcatgacttcgtctctcacaaccttcgacggtttcccccgtgatgatattgacatcgcgcaaggtacgcccttaccataccccagtcgatcgggacatatagctgaagggagaatgtagtacgcacaacgcgcgtgcgcattattcacctacggaacgaccacaaggaggtgatgcacctcctcgagaaaggtgtccatgcgcatttcgccaacctacaaaatacgcaagacgctggcccaaccacaaatggcactaacgtcccaccggctgtgcaatcgttgacaaataacaccgtgttggggacaccgttcgccaaggtcaatagcgtggtttcgggaagtccagcagaccaagcgggactgaaagctggcgatgcaattcgaagttttgggaatataaattggctgaaccatgagcgccttgctaaggtagctcaagtggtcaaagacaacgaaggggtacgttcggttctcccacgctctgtcaaaatacccatatatctgattcacttcctctacagcgggtggtattggtcaaagtctctcggaagactgatgaaacgaacactgacaccacagtggacttggacctccagctcacccctcggcaaaattggggcggccgtggcctgctaggatgtcacttggttcccttataaggggtacttccatttagaataacaagcatagcccggttttgctttcaccgtgtacatgataatatgtactgcttatgaataacgcgattaatgccatacgtcctttctacctgatttcacattatactagttaggctcttgtaataagactggggaaccgtatacatctgaagataacttggcaggcgaacgacctgaccatgagagtttattccaataacctaacacaagaataagtagagtccattgtgaatataatacttcaattgcaataaacattgtcatacacactaacttcacatatgtttgcgccatattgacactacgtcagagcgcctcaggcaaacatccacgtgactcccagcaacggggcaaaaattccatcgagcgccattaattcattccccttctttcacccctcccttttatcaacaacccgcccccataactacggcgcgaactcttgcaattttcttctcttcaagtttctctccaaactatcttaatcatggctgctgaaacccccactttcaagctcgtcctggtcggtgacggtggtactggaaaggtaagcgcattccagcctcgcgatctgattgttgatgggcaagggagtggcagccatctgctcggcgctcagtgatggtcatttcatgatattgatggatacactgagctgcccttttcgttgctagcctctgcccgcgcgcctgtcaacaatactgattatctgcccaacggccccgcctcaccgcgacttcattactaaaacagtgaattccaacagaccaccttcgtcaagcgccacttgactggtgaattcgagaagaagtacatcgccaccctgggtgtcgaggttcaccctctcaacttcaacaccgtatgctataccccgccacaaaccccgcttcgcatagtgtcatggtgtcatcgtcaactaacccaacctgaatagaactacggtgctatccagttcgatgtctgggataccgctggtcaggagaagttcggtggtctccgtgatggctactacatcaacggccagtgcggtatcatcatgttcgatgttacttcccgtattacctacaagaacgtccctaactggcaccgtgagcgatcctctctctgataatgaacccctccagattattttgactaactgaactttaggtgatctcgtccgtgtctgtgagaacatccccatcgttctcactggtaacaaggtcgacgtgaaggagcgcaaggtcaaggccaagaccatcaccttccaccgcaagaagaacctccagtactacgatatctctgccaagtccaactacaacttcgagaagcccttcctttggctcgctcgcaagcttgttggcaacccccagctggtacgtcattttatgcctggattcgatacgaaccgatcaatactgactgattaccttttaggactttgttgccggaattgcccttgctccccccgaggttaccgtcgacgagaagcagcttgaggcttaccgcaaggagatggaggaggccgccaaccagcccctccccgacgaggacgatgccgacctgtagatcgttgcgctcaacgacaggtccacgaagtttccgaaatgaaaattgggagtcgctatcccttgttctcccaccctatgttctctcgagtcccatctcacaatcgacgtgtgggaggcagggagtatccgactcccggggattgcctttttttagtttgggttttgcactgcaaaagcaaagtctcttctccgaaatcacgatacaatgaaagcggatgggggatagtcgtggtttgaagacatgcatttttttcctttttgatttcccccaatcttagtagcttagattctcacatcaaatcgtccttttttccctttgcgaaatgagcacacagcgtccgaaatggacgtcctctttcgacaagatttaaaacttcttttcttttactttgaaaatctattcaccagatggatctagatctctgaaattctcgtcaagtgaacactaaatctaatctacctgaaaaaggattgtaaggttggccgtgtagacattattgaatagcagtacaacgcttcttccacgagaaaaaaaaaagaataacgccagggtatagcagtcattggcctccaaaaagagagaacgaaaggatgaaagaaacaaagaaaccgcaaatgatttcgccagatacccatcactgggatagggcagaaaatgaaatatcaatcatatcatcggactatttccagtcgatcgagatcatctggcaaagagaacagatgcaatcaagcaaaattacaagtctctcacaccctgtgtaacggataaggagttagcaaagagtccagtcaaagtagaaaacgaggaaaatagggataaacatacgaagagataagcaagttccctcgcatctagtcgggagacattcatggtaccgccctcatcgagagcaccactgataagctcacgcttctggtcctgaagagtaacaatgcggtcctcaacagtattctcgataagcagacggtgaacgaagacctctctaacctgcccgatgcgatgggcacgatcaacggcctggtcttcaatgtacgggttccagaaggggtcgaacatgatgacatgcgaagcggcgacgaggttcagaccggagttgccggccttgagggagacgagcatgatcttgcagtcaggatcattggtgaaagccgtcacagcggcgttgcgctccttcagattcatgctgccgtcgaagcgggtgtggttccagccgcggcgggccagggggacttcgagaagatccaagagggaggtgaactggctgaaaatgatagttttctcctctaagccgcggtcttcattggcttggaggatctccagcgtctttgtgatttttgtgctggggaaccagcccttctcgaggcggcgaatgtatttcttcttctcggccttgttcctcaaagcgtccttgcgcagctgggctagagacttcgccttcgttttcttctttgattccgcatcgccctctccagtagagctatcggagtcagactcttcactgctcgctgttgcttctgggtcttcgtcgtcattgggcccgttggtatcaccgcctccggcggcaaattcgggcactgaggttggatcgtggacctgcttgaatgcattggtgtcggtgagtttcgcagggtccacgggccctcggcagttctggcacttaatcacagctggaccatcgtcttcgaggttgatggctccgtttgcagttgcagagtcggaaatgcggatccagcactccgagcacacatggtgtccacatggaatgtaaatagtcgcatttttgacactgtccatgcagacagggcaggtgccatcctcttcgccgtcattatctttgatacgttgcactacagcagcggtcagaagtttagcgttggcgatcttatccacccccgggatagacggggagggttcgtttcggaaatcctgcatgagaagtggatggcagcatgcctgccgaagacggagaaggagaactagaacatggctgtagttcctgcccaacgtgcctgagtcaaggtaccgggtgatctgcctttgagtggacgtattgagttcctcataaacctggctttctctctcatcaaacacaacatggaccttctcggtgacctttggtgggagttgcaagatgggctctccatcaatcttggaggattttgtgcgtcggagacagacagacttgactagaacgcgtagttgcttcatgacatcttcgcctccccaaccagatttaatgcgtctcacgaagtcctggatagatataaatgtcagtcagccaaagaagcatacatcaattgtgaactatagagagtactaaccgccttaaactttgctgggttgctataaggccgaatccggaggaatcccaaaagggactggaaatcttcgagacgattcatcataggcgtaccagtcagacaccagcggtaggtagcattgagtcgacaacatgctattgccgatttcgcacttgggttcttgatgttctgtgcttcatcgatgatgacgcgatgccacttggcagcaggactgagaggaccggccgcatttttgaggtcttggattatcgagggatcccgcccttcctctgccaacttttccgcctggagcaatgttttgtagtgcgcagtgattgtaccaaacgtagtgataatgatatcataccttttgagctccttccagggcctgcgccgttgatggtagatcaagactgataattggtgcctgcccggcttgacatggcgctggatttcaagtctccattgatccataagtgccttgggcgcgacaatcaaagtcgggcgtcggtcttcatcctcgaatgggcgagcaaccatcagtgcaatcgcttggatggttttaccaagtcccatgtcatctgcaagaattcctcctttgtggttgctctcttctttggccttcatccatctcaggccaatcttctgatgcttcatcaacgtgactcgaagagcacttggtgtctcatcattgtccgctttagttgcctctcgaatatctttgataccgctgagcaagttcttgatatcttcaggaaactccttctcgttgtaggccctatattaattgaggttagaatcagaactacctgcttcaaaagatgcggacgtacactatgtcagcatcgtcgtcgaatatttcgctttggttgcgaaccaggtcaaaggccttgtcaaacttgtcgaatttgtcatacttctcaaatgtacccggcattgtagcgtacggatgctcatgcgaccagggaaggtttctggaggcagctgctgatgtggaatatggcattgagggatttgacaattgggagggataggccagctgcgaaggatacggcaattgggaaggatatgacatttgggagggatatgtcaactcggagggatatggcaattgagaggggtatgtcaactcggagggatatggcatccgcgagggataaagtccctgtgaagtgtacggtgatttggaatattgcgaagggagagatggcaggtggggatatgaactggatgggcgggctggctgcttgccggatcgatctttgaatgaatcggctgtgatttcttgaagatcatcgtcggaattgaatggattgagtttattgaatggggctatcggggcatatgcttgaggtgcacgattggggtttgatgaaagatgttcgagttttaccggttgactgcggtcaggaatattccatgtatgacactcattggaacgggggagttgactatgatcctcgtcggcttggagcgcgcgagccaattccgcgtctcgttccatttgaaactctgtttcaatcaacttcgcctgctcctcacactcttctcgaagttcgtttatttcatctgcatcgtcacctgccgcatcgatccagtgcttgtacaagcgctgattctcggcaaggcgggcttcttgtgcagcatctatctcgtcgagtttagatctgtgagatttaggctgcgagggagcaatcctttttgatgatccctggatcgtgggcgagacctgagatagcggacgctggcgtttacgggaattatctggagaaggctgtatcattgatgaagctggcagcaatatcgattggccagacccggccgcgaaaggtgagggtgcagcagaaggccagtgaggggacgcaaatgaatccccggggattccagtgaaagtgttggacgccttgcgtggagtagccgcaggcgtccggactggcggagtaggggatgtcacttgtggtgttggggcggcttgagaagtaggaacaggatcaccaaggagcgtggcaacctggacttccatatttttgatggtatcacgaagctcatctgcttctgcacaaggaccccgcgtcgcgaggagatcatcgtatatgtatctgtaggtatcgagatcctccaaaaggtctttgatcttgtcctcttgggactgatcgaccgaagaagccatggctcaagagcacctggcgctgaccgcgaaatgttccaagaccaaaatatctgaccaaaatatcccgatcgttgagagggtagagagtgaggatggcgatgggtgtgacggctaggacaggaggcaaaatcgtagatcaatagagctaccacatcaagtgagcgtatagggtgaagagtaaagtgttctgggagagtcagccggtgaaacttgggttctcatcagcaaaccgcaaggcagaaagcgggtagcggcagatggcagatggcacagtgatgaagagaaagaaagcatagaagcaactcatcaaattgcgtctctgtgccatctcatatgggtatttgcagaggatgtagacttacaccgagtactatcgacgattcacgggggagaatctgtggatgacggagcggattttcggacctcaggagcgaagaggtagcgatcgcagaaatgagagagccctcgtttctatagtgcaaaagatccgatgggaaggacatgggagttgatgctctttgcgaccgttcagctggccccgggggtcgagatgttcacctctgcgggggcagttgaagttctcgcccaatatgtcatcctctatcgcagtctacagcgaccatgaggactttgatcctattgacttttattgcctgcagaaaattggctatctggagagacatgttagaagactcccagaagatatttaaaagacgtttagaaggacgacaaaaaagagatgagagagagacaaatgattgaaacatctctgaaatcatcttacaccgactagatattcagatgatccaagtcctatatcggtaagggtagaggtgtataagcggccaactattcaactcccatgtaaatgaccaactcactataaatccagagaaacctcatatcaagaggtttcccagcaattcaagtactctctacagagtaaatgtatgttcaagacgttagaaattacttcatagaaggcggaggcataggcggtaaagcctgaaagcaaatcaagcccaagttcttaatggacgctatcatctactatagttatgagtacctgccaaggtcccacgagggagtcttctacttgagcctccatcaggcactgtagttttattcattgctatatgtcgtacatcagtattgaagtcctacagaaaatgttcttcagtaatatagacatatacttcagagtatgtaggtgattctacctgcgtcgctgtacaaccttgattgacataaacgcgctcttatcagaacgtgatcctgcgcgtcacgcgccaaacaagctaaacacagggctagatgatattgccctactatcccaattaggcactggacactccaggcatctggtactagtttcagccatcccggagtagtttcaagatttcgatcatgactgtgagaggttgatatgactcatatggtgcctgggctggaggaatggtcgattttcatgttataagacaaggagtacaacattcgacgtgaagctcaggctacaactgatgccgatattcagaccggaggaatatctcttacatgtagctgaaacgtaaactagggggatcacttggagatatactgaattgttcaactaccaatcatctacgtgtagtgcccatatttcaatcaattgggttgctgcctcggtgatatatatctgcaaagggtctccgcagaaacgatcgatccatcgatcatggcatcggaacagggactggttcgactatggaagacgaagcacatcccagaagttctcaagagctatctagcaaaaaaagacctcaccgcatgccgtctagtatctcgagagctcgctgtctacatcgcaccaatcctcttcgcagacattgaagtccgtttccgcagcagcactttcaacaggccatcacggatggcagctctagagcgtatcgggggacacatccaggccatgacatttaagatctcacatgatagggagaccttcttacctccaatcctggatccaatcatggggacagaacagacgttcatctacacaccacaacgacgccaacatagtggcagccggcaaatgacagagttattagtcaagcagtacccgcctctgttccatgcatctacaaacatcccatcatttgtccaggcattgacgatgatgagcggcttgcaacatctgtgaatctcctgtgagggtcagctaccaagccatcgctatcgccgaagtgtagtagattatgcattgatctcattgcgaatggcaatccagcaagcactattgaaagatctccacacctgtcattattatcagtccacccaggagcggtcctttacctgtgtccagctctaggatttggtgcttcgcctgcatcctgcaagcgctggtcccagacctgcaagctcacggtccaaatgacgaatttcggccatgagccaggtcaaccgacagaccacctcaagctcctccacgcatacctagcaagcttcccatctctgcgaagactggtctttcattgggaaggcgagaggggcctatcacctctatcacttgcaacaaagccgagcctcaacagcaaagccacaggaaagccaagtcaagcatgtcctcagagatgcgcgtcactcttacggccattgaaattcaagcatcttcagcagatggagctggtcaatgcaacaatggacgcgtcgcaagtggcgtctttcatccaggagcaccggagttccctacgagagttcaacttcgggaacgtggtgcttcgcggcggaaattgggacgacgcgctcgcgccgttgacacgactcaggggcagcgaagggtggaagcaggggcagcgcgacaccgacaccgtagatgtgccgatagtgttgactccagctggagtcagccagaaacaattatataaggcgatttgtgctctgcagcaacaaaagggaccgaggagggtgagaagcttggccaaagcgcgatcccggacacgtgagctgctgttgtgagacgcggatcatatgaagcggctgcttcggtcttcggtgtttagttggcggtgacgtcaagagcaaggggtacgtaatgttctcttccaaggaaggaatggcataggctaagaccaacaaccgtagtagtgtcgcggcgaataccgcatttgtgaaactttcaggtcccaatgcaacctcagcgtggttcgtgtggagtcggnnnnnnnnnnnnnnnnnnnnnnnnnnnnnnnnnnnnnnnnnnnnnnnnnnnnnnnnnnnnnnnnnnnnnnnnnnnnnnnnnnnnnnnnnnnnnnnnnnnnnnnnnnnnnnnnnnnnnnnnnnnnnnnnnnnnnnnnnnnnnnnnnnnnnnnnnnnnnnnnnnnnnnnnnnnnnnnnnnnnnnnnnnnnnnnnnnnnnnnnnnnnnnnnnnnnnnnnnnnnnnnnnnnnnnnnnnnnnnnnnnnnggggggggggggaagtcatggggggcgaactgtcaacacggggaagactgagagagggaccaagactatgaccggtactaatagaaatgcagatcctagtccagtctagacagaatcctggagaaatggcaacaaatagagcaaagtagaaagaagaatcacagacactgagcttcgggggaaagtgtgggggcctcggcacccgtggaagctgaaggcagttcacatgctctggcagattgtcacttatattcactcacccgccttcttgatttaccatcaccttgtactaccgctacatccaccatgtctctcaagatcggtataacccccttattctgactgtaccagaacccagctaatgaaaatagattctcacccctcgtccgccgccttcgacgtgatcaacgagacgctccaggccaacgaagccagccgcaaggatgccattaaccaggccaaggctatcttcgccttcaacctgaagaacactagtggtgaggaggcttcttggtaccttgacctcaagaacaagggcgaggttggacagggtcttgcccctgctggcagcaaggctgatggtgagtctccgttcctgatctgcggttgatcttacacatgctaatttctcttcgtcaatagtgaccctctccctctccgataatgacttcgctcagctcgtttccggcaaggccaacgctcagcgtctgttcatgggcggcaagcttaagatcaagggtaacatcatgaaggccaccaagatggagcctatcctgaagaaggcccaggtcggtgccaagttgtgaagattatatacccgtttgagaaattatataccaagtccctcatctagggcgcatattttcggcctcctattcggatagttcggttattcaactccgagtataacaaatgatcttaatatgtaccggggaccgatcatcgctgttcggatcaatgaattctaactctacaagtctcccacatgcccttgtcgcgaaacccgcccctgatccaaaaccacaaagtaatccgcatccttgacagcttctatgcgatgcgcaatcgtaatgacagtagactgctgcagctcctcccggataatctgctgaatctcaagagaagtctcaagatccacggaagcagtcgcctcatcgagaatgacaattgcacttcgacgaaggacagcccgtgtcagagcaataagttgccgctgaccctggctaaggttcctccctccagcctcaatgtgcgtctcaagattccagccgtgccgactacagagacgctccaggatttcattacacagctcatcggaataatcgcctgtcgggtccagattgagtctgatgctaccggggaagagaacaggatcttgcgcgacgaaggtaactcgggtgcgcaatgcttgtgtgctgacgtcggcaatattgatgccgtcgatgagaatgcgaccagactctggtctgatgacgctcagaagcgacattgccattgtggacttgccgctgccagtacggccgataaccgctgtggtggatcccccggggatgcgaagagagacgtttataagtgaaggatcgagatgtggtgcgtaacgaagagttgcatcttcgaagacaacgtcgctaccgtaagttggccatgcggcagggggaacaatggtcccaggggtttcttcttcaatgtggagtaactcgtcgactcgttccaccgacacaaagtccatttgaagttggccatactgcttgcacaatgcatgtgtggaatcgacaaagttgttggcagcaataagtacgaaagctaccagtcctggtgtggtattggtgtataacgccagagctgttagacaaaatgttgagcaagccgacaagccctcaaagcggtacatgagccagctctggagagaccaatagaaatggtccattccctggaacttgtcaaccacagatatgaccctgttctggaactgtgattctgcgtggaaagctcggacagtggtcagaccgtgtaatagctcgccgaagttggacaacaaaggactcagggacaccatttcgagtcgtcgtaggctctgagatgtggggaggaaacgtaggaataccgagacaaatgcgactgtgagagctagtgaaaacaacaaaaacaccggggtagcggtggcgattaccaggacagaagagatccaagtgatagcctggaaggcaatcacctggaattgctcactaatattgccgtccacgactccaatatcagatgtgagacggttcatcaagcgcccaagagggattgtatcttgagaattggtcagctttgtcctgttgagtcaatctacatagaacttacccaagtatcggaaggtcgcatggctgactcggaccaagacccgtcggaacaaggactgcccagcataatagacgatgaccagcattagaagctgagcgacaaggagtgtgaccgcttggaaagagatgatggcaaaaaatgtccatagccagggtcggacatcctcacgcggagatggtagttggcctatggggttcggaggcgtaaagtgtgtgcccatgctcaagttcgagactggccgggtgctttgcgctgacctctcactccaattcgagagatcccctcgaagagcagttgtccgctcatacgcttctccccaccctttgaggaaccatgattgcccgacagccatcagtcggtagatcgccagaatcaggacgagggtaagccaccaccggtactttccagccttaatataattccagtacactcgggccttgacacccccgtctgcccggtgctcttcctcgatgaatttatcaggcacggcagctgtctcctcctcgagggtgggttccgcttctgtttcgttttcaatatcgacaaattgcagagaagactcggtcacgtcaagcttgagggtatccttgtcgtaaacagtggcatggtttccacaaatattgataatttgatccgcaattcgacgaaccaacgtagttcgatgcgtcactagaacgatacttcgatctttcatcaaaggccccgagaagcatttgcggactatcagctccgcagtattgtgatccaacgcagacaggggatcatccaaaagcaggacccgcgatgcgctatagacagctcttgccagagatactcgcgctttttgtccacctgataaaccaatgccattttcacccacaaacgataaatcgccatgtttgaattgagcaagatctggaagtaaggcgcaagcttctagcgttcgtttgtagcgctggtcatggtagggcgcggagaatagaatgttgtcacgaatactcatgctttgtagccacggtgtctgggcgcaatatccaaccatttcgtttggaatatgcgctgaaccggaaagtctatcgagttctcctagaagagcttgcagaaatgcggtttttccagcaccgaccttgccagtgacaacagttagtcctttggggatggtgacattgatatcaacaaggacgggtgagacctttcctggccacgcaaacgaacaagaatgcattgagagtagagtatcgttcgccggggtttcagaaggcagattctccttgtctggttcggacatgaagtcctcgatacgcccaagggcaatgaaggcattgataaatgatgtgataagactaggaatatcccgaagacgagtctctagcatggtaaataattgtaatgcaggaaagataatatcaatccgcagctcatgcccggccaacaaggtatacgcgtacaacgcaaccactggaaacacgccactggcgaaagcgttgataaagcgaatcaggatactccacagactagtcacaatccgaatattcaactcatgctgtcgggcctccattacttgttgaagccagtgattctgccacccgtaccatcgcagatgacggattgcttccacaaattgcgaagttatttggagtcttgtatccgttgccactcgtctgactcgctcccaacgtagaagagctctagttactagggcattcatgatctgtgcaaccaggacggctaatattcctagaaaacaagacggaccaaagagtgtccagacaaggaaggtagcgatcacaagtcccagtggcttgtcaatcaacgaatcaacctcccagaatctctgtgcaacttcataaacatctccgcgcaagaggttaaagattttgccgagtgatgctgcttctttggcttgtttctgtggcattttttggttgcgagaagtgatacgttgccagaaacccacggttttggtagggggttgatcgttctcttgagctccggcctcaccattgacgccatcttcctcgtcggatggtactggatcgccctcaatcattagtccagaaatgttctttcgagaaagggctttttcgtaaaccatcatgatcatttcaccccttgaccgttcatagcatcgtctcccgtaccacagaagtaacacctgagactgtgcagcgacaagtcgaagagcgaaggacatgaaagcataggtcaaaggtacgcgttttggtcgggacgggtctttcatggcctgcaatagtttctgcaataaaacgggagtagaaaagtctgtgaaaattgttagcgatataagataaaagaagacatctaaattcataccacatatcatctggacaagcgatatggttgagatgattaaaacatcaattccattggctctcaacagccggctgaggacagaaccacgaagtcgacgaaacttttcatgcaggcgggcatgttgaaagtcaaatccaagcaaccaaacgtctcgttcatgaagttgtcttttgcgcccagttgagatcagcggtgccatccaagacactgtgaggaactgccagagcctcagattatcttctggggtgcgaaagttatttgatggctgttgaccaacagcactaatatctatcgatggcaaagactgttcgcggaatggcattaggaggattgttgcacaggctgccgccgctgcccctgcggcaatgtagcgagcaaccatcttgaatttcgggcatacatctgggtgagtagccaaagaaagttcaattgtaaatgctagaaaataatacgaaagcatcaagatggaacatgatctgggccgcttgactgcgaccagaatagatgctgtggcctaaagagggatatcagtaattgatactcccagagacgggaagaaccgacccatgagagaacaagcgcaaaggccgaggcgtcaattgtcggaggaacaaattgaactgtctcggctagaagcccagtagccgaaaatagaaggagagagatagtccatcgcaatgattgcttgggctgatctagcgggagatcttgagtatcatgttgctcagacacaaaaggaacagtccacttggggcgccatcgctggcaggagtattcaagtatatggcttaatgcaataagcaacactattatggccgggatgcatgctaggtatggcaatgcacaaggtgataaccacgcattgtgcgagtcctggattggtcagacggtgcgagcgggaacaggggcccgcgagtacatacccagaattggtcacactgggatctggatgcaccttccagcggaatttgattcatgcttggtcccaagtgcagtggcaactcttcgcggtagccttggggacctcacgaagcaacgtggggccggatcaatattcatccgctggcccgtgtcatctatacaggcgggtcagagtttggaatttagttctcgcctagaacattatatagagagtttataaaccgtgtacttgtttcaatggtgttgcaattagagctgttgccttgcagggaaatatgccgagtctatcgggcggtcttacggcttcaatgggcggactggcggagtcatccgccgcggggcgggccccccccccacagcgatctggatgcaccttccagcggaatttgattcatgcttggtcccaagtgcagtggcaactcttcgcggtagccttggggacctcacgaagcaacgtggggccggatcaatattcatccgctggcccgtgtcatctatacaggcgggtcagagtttggaatttagttctcgcctagaacattatatagagagtttataaaccgtgtacttgtttcaatggtgttgcaattagagctgttgccttgcagggaaatatgccgagtctatcgggcggtcttacggcttcaatgggcggactggcggagtcatccgccgcggggcgggccgcccattcacagtccggatgaacctcgtcacaggcaaactacatttttaataaagcctactaaggctactaagttagaacagtaatggctggagtatctccccaatacctggcgcatggtactgatttatgcttgaagcaaggcaggctgcttatcctgacaacagaagaatgcgatattaaagcggctacatagcccgcctgagaactcgtgttttactatgtaataacacaatgatcccatgaatctcctgcatcaaagagccttccacggcaaatcgctcgatggtttctatcgtgttcttctgcaaagtatcaatatccggtaccaagtgggccaaagctggacaaacagagcctagggtcaggagaagaatagaagaaaacatccttaaagaatcaaacattagttgagtccaagtataaagcatctcgtagacatacgtatgaataatgatttctgcgcaaaatgacgggcccaccagtctccgcgttgaggcatccagatacgttcgacaattggctatgctggactcgcactgtttgagtaccatagggggaacatcattctcgggtgatgagtcaattgcacaaagaagaaatggtctagttatgatatccttggcggagtggaagcggtggagcatattgagttgaaggccagtacatcgtgacggatcgttcatatctggtttaattgttcgcggtaataagtcaaaccaattgtcgagctgccgggcaagctcttgggagacattcaggatcgcagagagcgattggaagtcataagagggactgtcgcttgagactggctgtagaccgaggctgcgccttgtccagtcacttccgtacatagtgtggtgtactctatttagtaggcgacgaatggatagttcggcgaggaagacgtgtgtttctttggcgtcgttatttgcaaaggttggaaaaggtgtcagatcaattacatgttcgataccgcttcgtggtaaatggtgttcagctatcagatcactggtatcaatatcagcatcaacgtgatttacccggatgggaccaagaaaccaaccactcggtgtcgaacgctgcccacgatagcagaataatgctggatttgaggtcatgattatctgccgaagcttggcttctatcccaaacagatgcttgatcaatagctgaaatcaaacggaaggacaaagagcttaacgaaccggctatttaaatactggatactggtggaagccatgtggaccagtttccatgattgcagagggcgtaaaagaaacccaaaatatttcgaaatgagtatcaaactctggggaagagtgattgtgggacaaaatgaaagtaaatattcattcatcaatatctgcaacgcaggtgaaatgaagtctgccccaggcacccagtatggagacttggactttatcgggtcaacctgctcgagagctgcagagcctaatgcaagaactgcaaggcatagtgcagagtcacagtcaacgctcagaccggccctaatatggtgatcgtaaagccccaagaattggtctttgtcaaggattggcatctcaacatggacgtgtttgaaatacgcctccactagtggataagtgctcgcttcattgaggattggcaactgactcgctgtaattgtacctggaacaaaagatagctggtgtggcatatgcctttttgattctgcgcgtataaacaagtctgggggaaactctccgaagagcgcctttactctagtcatatgcagcatatattcggttgttgttgtatgaccgatgggaatactcatgggtggtatatcatgttcaggtggtatgaaagtagacgaattcgtacttataagctgggagatatccgccgggtttggtcttgacggggacgaaatcaacatggtagaaggatgagaaaagtccgctctttcattctcagatgacggcgggagtgtgaaatcaccactccttgtttcaccagtctggggtgtttgagggagtctcggatgactccataagaagttctcaattgcatcgagacggcgaaagaactccgaagaggaagtttcccctcgaggcctgtcggggttcagtaacgatggcgaaacttgaaaaaaaaacaaacgggtgtctcacctcgcagtatcagcttcattataaacacaatcaatacctgaatcctcacagaggctacaggagggtatcgcaccattgcagcggcgtttcctgcttgtctgtcagcatgaggaaacttggtcataggagttaggggaacctaccgcctgcgacaatagttgcatgccaaagaagcacgcttacgaccagtttccatgtggtaaattatatgggcttcaaggcttaaagccacctagatgaaccgtgttggcgttgatgtcgatacaagacgggaaagtccgccgggaacccgcttccacccgtgaacagattttgttccgccttagtcatcgacacttccgcccgctcgcccagccctggggaaagcttacgatagaggaaagataactttaatcttatttaatacttaacagctcatcaacccttccaatattgtttttcgctctcttctcttttatttactgggaaaaatctctcttcgacctggacatctccatctccatattcctttgcagtacggagaacggaggacacaacgccccttgccaagaacaccgacccacaccaaggccgtttaccagtcttctttggcttggttccttaggtatatactattgtacaattaggctgactcctattcaagatctttgttttcaaggtcattactcgttaaattcaaattatctgaagccgtagacatggccacgtttaaaaatgagattcaaagttgtttcgggccgaccttcgggaaactctcggctccacctgagttccccggctttcagagattttttagggcttgatcgagatcgggaatacccgattcttttcagtctttgaaacatattgagagctattaaagttagaggtctaaagtctcgactaagtcgcgtggaaggaacaccatgtcggacgaaaagtatgttgcggacagcaagatcgagagaccactcgaaaaagacgtggagaaaaaattggacgcgacgcaattggagccctttggaaatgaggacacagcggaggtcaagtatcggactatgaaatggtggtgagttgttaattcctgcataaagattgtgaattcgaccatggacatggctaatcaagcttgaaaaggcactgtggaatgcgtgagtagctaaatttgagatcaaaagcttggctcctaacatctattgcagtcatgatcgcagagaatgtttctgtcggaattctgtctttgccatccgcagtggctacccttggaatggttccgtatgtattctcttcgacagcttcgagatcccataactaacaatgtcaaacagcgctgctattatgattttgttcgtctctgctctttcatggtatactggctacgtcattggccaattcaaacttcgccatcctgcagttcacagcatgggagatgccggcgagatcttgatgggtcctttcggccgtgagttgctaggacttggccagctgctgctgttgatcttcctcatggcgagcaacattttgatgttcaacattctgatgaatgtattgaccgatcacggtacctgcacgttggtgtttggtgtcgttggactggtcatctgctttttgggtgccttgcctcgtaccatggacaaggtctactggatgtccgtcatttgtgagtgcagtcatgacacttttcaactcagatgagaactcaactaatgtgtatgaagcattcttgagtgtcttcgttgcgacagtgttgaccatgatcaccgtgggagtcgagagcaaaggacatgtcaagaacgaagcgacaacggatgtcagcttccgcgaaggctttttggcggtgacaaacatcatcttcgcttaccgtaagttaaacagtgaatcgccaaatgatgacggtgaccagcacttgaaataaaccgagctaatccagagaccgatcttatagtcgcccacgttgcgtactttggcttcatgtctgaaacagaagacccacgtacattcaacaagtcactcgccatgcttcaaatcatcgacaccaccctgtaccttgttagtgcactgctcatctatcattacgtgggaccggagacagccaccagcgtcggcgtgcaatcgcctgccattctctctctaagcccgttgatgggcaagattgcctggggtctttcaattccaacggtgagtttattcttttggttcgtcttctgtatcccacttactgattcaatacagacaattctttccggagttgtcttgggtcacgtcgcgtgcaaatacatctatgtgcgtatgttccgtgggtcagacaagatgcacggccgaaccttcctatcgattgggtcctgggtcggtatctgtctcgcagtctgggttgttgcctgggtcgtggcagaatctattcccgtgttcaatgatctgctgagtctgatagtaagtttatcgaatctcactcgaccgggaacgtttgctgatgtggagattacagagtgcggtctttggaagttggtttagctgtaagattgacccacctttccatcattgaatttcaagatctgaacaagtgctcacgtatcattagtcggactcccggcgatcttttggttctatatgaataagggccgttacttccagaactggaagaagactgttttgacgattaccaatattttggtcttggctattgcctttgctattgtaggtatgcccctacttatatccagttatggtggctaatcctttccagtgcgggttgggactatgggtgtcaggagtcgccattcacgaagactccagttccagaagttggtcttgtgccaataatgcgtgattgaagagttgaagtttgacgtattcgaatactaacaaagccagactatgccgagtctgcacatggcatgtcggttaatctgcaactggttggccacggactcgaagaaaaaccgttggcgatggcggattgtcatctgaaatccatcgccccgtgactaggacgaaccaacacgaattcagacattatgactccaatatcaacagacgtgatttgagatggaatatgcagcatcacggccttggcggtagaaagcaattgtgcgtagagtggccgttgcaccaggacgagcgcgcgactggatgaggcaagctctttctaaccaaaatctaacgaggccggagactcgcacaatcgtagtcgaattcatggtcaaacctgtttctgtcaatttttggcagccgatcgaacaggctcaggggaggaaggggatgttgtaattaagaggaattatttccgagcggcctccttatctcatgagaaagaacctcaaatataccaatgtacttggcaatctcaataccctcagacagcgtactttagtggatgtcggcaaaggaaaatccccgactcccccgctttggcggaagtgtcccgcctcccatccgcctttccccacctgacattatcgtatcggtgtgttacttccccgccagcgtcagaattattattctcacagagctcgctacttcaaacttgctgctggtagtgatcgtcaagggcggtgtattcacgctccacatactttccactccttcttacatcctctgcgcccagtgtgaactgtctgtcttggaatttagccttacagaatcaatatgcctaccaacacctcagcaggagcgagtgaggaccagcgtgcctctctgatttcccgagtccttcctagaatgactatgtcggagggatcaagtccgctcactcgccccctcgctccagtgccctttacagatggtcgctcacgagcagaagcacgatttcaagttcagggcaaagccatagtcaccggcggagcaggaggactaggcttagtctctgcacaggctctcctggaacatggactctcctcactatgtatcatggacctccccagtaccttggagacgtcatcagaacaaattcaatcactagcatcaaagttcccctctgccaatataaccaaaattcccctggacgtgacatcaatggagtcaatcgaagccgcatttgaacaagcaaacaagacaatggaaggtatcgacatcctctgctgcttcgctgggatccccggctgccaaccatccctctcagtaacacccgaccaattcaacagagttatagacgtcaacctaactggatcctttttctgcgcccaggcagcagcaaagcgcatggaatcctcaggcaaaggcgggtgtgttttattcactgcgtcgatatctgcccatcttaccaatttcccgcagccgcaggcggcttacaatgcgagcaaggctggggtcgcgcatatgactcgcagtctggctgctgagtgggctgttcatgggatcagagtaaatagtattagtcccgggtatatggatactattctcaatgctggggacagtttggcggatgttaggaagatttgggattctcgttgtccgatgggccggatgggagatcctgaagagattactggggctgtagttcttctgtgtagttatcgtgcaggacggtacatcactggtgctgatattgctgttgatggggggactttggctctgtgacaatatggtagatgctagctacttttcccctcctgtcattggttccgcttgtcttatctcagtctgcatcgcgggtgtccttctcaagctttgtctgcttacttctaattctcaaatcagtttcaaaaaagtagtgtttcttcaagaattgttcattgtatctttttaaatacaggaaagaccgcacagcagctttttccactcctctttaccggcagatgtaacctccatcaatgcgcagatcggcaccagtagtgtaagtactagcatcactggcaaagtacacatacgccgccttcaactccttaggatcactctggcgacccataggaatcatcttattccaaccctcctgaatatcagcaggcacaaagtctcccaaaccggtattaatgtatccaggcgagatactgttgacacgagcaaaatccctccactcattcgccagcgagcgagccatgtgaatacacccagccttagcgacattgtacgaagtctgctcctgagggtaattgacaatgtggccggacatcgaagcggtgatcacaaagcttcccttgccgcgctccttgaaatgggggccaacagccttcgcacagtaaaagaccgagttgagatcggcctggatgacatcgtcccagtcctgaaccgagccctcgagaacacctttatcggcagtacggcccgcgttcgcgataaaggagtcgatcctgccaaagtcggtgatcacgtttttgaccagctcttgcacttcgtcccatttgcctgtgtcgcatttgtaggccttggctttgactccgaactcctcttgcagggctttggcgtttgcttcggcgccctcggggcgcgataagtatgtgatggcgatgttgccgcccatttcggcacagccccgggcggcttcgtagccgattcctcgggggccggaggcgccggtcacgaccacgaccttgtctttaagactgaagaggtctttgagagagctggcttgagggacttcgataggcatggtgggcgagaaaagggaggagttgaataggtgtatagaaggaaagatgaaattattttgaggattgttggtttgtgtggaggattaaggggtcatagaagggatctatggggtctttataccttttcatcgttgatggggactcgggtccaaccttcccaccgtacaactgtgcaacttgttttgctctcacttgagatgttgtccttctccacccggcgggacactcggcggcacaatcccgccagcatttctgtgggcactttggaggggcggatctctcaaattatttctcattttggtagataagataaatttagaaaatagcaaacgcattaggcgggctagcgacacccccgatgacctagaccgagtctgaatcagcacaatccccgcacagtcaataagcgggaaaccaaccttcaaaggcatactggacaagaaaaagctatagcgtccactagccttgcaatgttccgataacttctccaaatcaaacatctccccaataggagttccccagcccgccagcacccactcatgtaaattgaaattcgggtccgcatgggcacctctaataggcgcacgctcaaaactcggcgcatcaccagcgacagcagagaattgatgcgcccataaccatcgtaccatacactctgtcgcctcgacaccgctaaaatcgggcgatgatcggagggctaggtccttgcgctgctggtcgtccagcttgttgtatgcagccgtgaagccactgcggataaagagaatgtcacccttttgaaagttgaggttgtgatctttgactactcgtttcaggttttcgacggtaatggtctcggatttgagggcggaggtggggattgagtttgtggtggcccattctgcgtagtcgaggaggacgccgcgacctgttattccaccgtgttcacatatggctgaggggttgagattagtacggggttaatcatgtaccttgaggtgatgcatacagtgaattccaatgatgtccgagctttctatctcttccgtggtatgtccgttataaaactgcctggatttctggtttgctagattcgccaaccaataagcaatgatctcagacgccatagacgctcaataacgcaccgtaatgtctaaatccatcccattgggtagacccctggctattgaatgccaaggtgtcatcatgaatacaatttggactccgaagaataagctcgtgcttaaatggattgcgattgaagcttggatacgaaggcatgctcaacggccagtcaagagagattcgcacgccagttttgatttccttggcggcttcgacaacccgctcgggggtgagcaggttcaatgtcccaagttggtcatcttgtccaaatcgaccccaggcattccctcgtgggcctgttgggtctagtggaagggagtcaaacgagatcattgcgtcttcagttgctttcgtcatgatgaacggccccgtgagaggaaaaagaggctgaaggtgtatatatgctgttgttatacgaacgggtatagctttagctcttaaatggaagaggcgaacattaaatacggcgtataatagctcaatgtcaagacaaaattgcgtactcggatatgaatccgcgtgtgggggaagcttatagacctcgggatgagcggggtctacggggtcaccccggaatggacagctcgggagctcggggaaataaaccccgcgagtgcaaatcatacaataccgtttttttaacaactagttacaatcaatactgcaaattcactcggaagtattaagaaacttgaggcttcgttgatttctcgttcccgtgacaacaattgctaaatcagcacatgagagccaatctagtactggatactacatctttcgaatcgacgatactatattcgttggggtcatcaccttcccttcccgtgatgaagacaaacaaacgtatatgttgggtgtttgcatcactatgctgataaataagatcagcgctgtcaccctcccctgcggaatacccatctaccaactacccgatgatgatgagcgacgatgaagacgtcatttgaaatgccgttctatgcgactgaattgccctgcccgctacctactggtactgaaatcgagaatgccccggacttatccatgcgacatggagggcgaagaatagtcggagtaggccagcattttgttgtgaaatttggactaggtgtcgatcttattgaaggagaaagtatgttatttgttcggtataatacaaacatccctatcccgcgagtcttcgccctatattcggatctagagataggcaaaaacttcattgttatggagtgtgttctcggtcaaatacttctttcagtatggccgcaacttataacatcggaaaaataggaaatactgaaagacctgtagggatactttgacaacttgtgccagcttctatccctagaatactttggtagtcttaaccaaagacagcttctagatgatatattttggacacaggagccagatctattagtgaatggtccttttaactctgaaggcgatctcaacgaagcaatactacgaaagtatacctacaacggaggcccgtactatagggcagaatatcttcagaaatgctttccttttgtttttaagggcaataaggcgacatttacccatagtgatttataaagaaagaacattatactatacaagaaacctcatcgagaccaagaaggggggcgcgttgtgataattaattaggaaaatccggatggtatccagggtattgggaatattgcctagctgtctgtgctttacgatgggatgacgactggtccctttggatcgacggtatcctatcaccgtgtgtctccgaggctgcatactttcagtcactacgcctagaattatggtcatagggatattcaaagtcatttcgtccaactagagaggatgtgatcgaaattttgactagattcttacattaggcataataatctaggagtggttaaactatagaatttgagtattgtgctagtatcaaaatggtaataagttcttttgtcaagagagagaaaatatagatgctggaaaagaggggctggtgaaccccttcatgcaggatatataaggggcgcatacgatcccactgctaccttgtcaccctatcgcacaaggagccgcagaaaggtatatatgttgcgattgcctttcttggattaccctgagtctcgttatatccgaccttctcctattctcaccccgtttgcatcctctatctccaaccccaatcgcgcacagcccttctcggggcgtgcaatagaccaggaaacggtacttggtgagaccatttggaaatcatgtaatacgcattgcataaatatggacttaggggttaatcctcatgcgtatacaagtggtcgatggcttcggaacgataagcatcaacgccagatacgccatcttgatattaattttgacgaactctgccgtatcatggaacatgcggcaggagttcagttacaacagaagtggccctatatgccaggcgactagaaggttcgatttgtagatgccatctacagaaagcttaaagagatggccgacattgactttccagcctatggaagcttatatctttccaccccttcattgggctctttctctgggctactactaaatggcggctttcgcctcggaccccactgtggaacaagatattgggattgtggcgagcgcagatacgaccagcatacacttcccaatcaaggcccttgtgagtctctcctagcccattcttcagaagatgatggctaaaatttgagggtaagggttgacattgactgcatactctgatggcctagtggatgcaggtctttcaagggttccaccgaatgactcctagatctcaaatcgaccattctatcacggctcagttcagtcacatttagaccctctcgaacgtggtcgtacagtgctccattcgatgtctgcagatacccaactacatgatgcagctgcgccaatcctctttcaccccgacctacataagaggaacatatttgtttcggatgatgatccctcgattataactggcattattgattggcagtcatccagcatagagccagccttctggtatgcggatgagattccagacttcgcaagttgttcgccttcctccgaattgccttctgggaatctaaacaacagcgagctatgcagagacaccttcgaagtctgtactcaattcctcaccccaaagctcgtcctccctaggatgatggatgaaggcatgttccgaccgcttaggtactgctacagaacgtggaaagattgcgctgttgctttcaggcaggagctcattgaaacttctagggactgggaggcgctaggactcgttggctcgtgtccatttgtctcaccgagaccggaagaactggctgttcatcgaaaagaatacagatgctttgaggcggcccagaacctaaaacgtgatttgtcaaacttgcctgattgtgcatctgatggatgggttcctccagagatttgggaagaggcaaaattacaaaacaaggcaatgttcgatgggatgttgcaagctgttctgacaaatgaagatcctaatgaggatgaaccaattagggatgaaagggacctgagagatatctggccctttgatttgccggacgagtagttggtctcatctctcattaagttccataagcttagggtactctttgaagacatgcattatgcgccccctacggagattcaagctaaagaatttcttgaaatcagagctgtgtatcattaaagctcaaacgccttgagagtcaacgatcttggcaactagtccaatttacaccactgaaactgcatatgtactggatgatcttcggcattcacgacctttccccttccataactaaataccctagaaggtgaagtacgcaatagtagcagcgaacgtagccagattgtcgccaaccgtcgccaacgcagtaccatccttcacaatcatatagcttgtcccaacagtgttcaacccatataccaccagtccacttgtactgccctcaacgctgaagatcatactttggcaatcctctggaagggggaaggtggagcaagtggtgctgtagttgttgaaaaagctgtatagcccagccccgtagataatcacatccttggtattgagaatccgaagaccaagagagtcgcagtttccgccgagacagctgctatagtcagggtcattgagagccgagttggtagggtacgggccgttggctgcattgggatttggttgatagtatctgcatgcaattggttaggacaggagatgcaagggcagcagcacgtgttggatcacttacggagtttctgtttgtatgaaccctgccacaatcgaactcgcgcctgagaactgatactgatacagcgagtgatgctcggacgccgttccgtatcttgcgccgatgttagttatgagaaagcattgtgaggattatctgtcacttacaaccagacattatttccttctaccaagagaccgcgaccggtatagaccgagatttgagtattagtagcgctctcaaggtcatggtcggcggtccatagccagacattctccaagtaaacaccactggcgactttggtaatgtgcatggacatgtaaccaacctcacagcctgccgagacagctgcagtcgtcgggcactgagcaacctgctgctgagatccttggaagcccccgattcgagtgtgaacatcccacatcccagcgcctgatgtcgctgccaagttccactcaatgagtacagcgcccggcgtggagcccgcggtgctcactatcatatcagaccattcaacgaacccagattctccagatttgccaatttgaaccaccggaacgggattggtaatgctcgaccatacactgccggttgccatgatgacaggatatgcctctccgacaatccgagagcccggtgggacgtaaatagtgccggtgactttgtacgttccttgatcaaagaacacaatcttacctgcagatgcggcagatgtcagcgcagactgaatggctgtcgtgtcatcggttgaaccatctcccctggcgcctgcacttctaatgctgacaaacgaagcaactggtgattgctcatactgaggctttgacttggtaaaatatctgttcgatccaccagcaagcaaagcgctaggacgtgtcggtgcagtgaaagagccctggaagttggtcggtccgtttggagtatatttgtggccttgtccccaagcagcaatggtcgtagaggcccccgagccagcaagaacagtaccactgacgcctttgactgcaacggggacgttgttcagaattatgttctccagaatgagacttccagttgatagtgtggaagtctgccaagcggtatcgacaaaggtagggcagttttggatggtgctgtcaaggatattgaccgagccaacgagttgggccccagcaccaccattgctgatcgaaatagcagttgtgcagttagtcaaagacagaccttgataagtccacccccagttccagatctgagaaattgcggtcactgaatttgaaatggccaggttccgcattgtgaattgctggttgccaatattggcaccatagaggccaccattaattaccacatcggtcaaccagccaccagagcctggtattggattagtatagacctaaaaaaaataaagtagcaacataccattctcaatgaaaataccctggtgctgtgttccagaagcagaactcatagcaatgacaacgttctcgatgctggaagcttggccagtcggccaatgaataccagtcgcagcagtaccggcagggattgaggtcaagtccaatttcaaattgcgaacctgtctgaagaacacattcgtcgacgtccagccctggtttccatcgctctggtattgatcaccgtcaatcagccccagtccgacaaaacctgcggttgcttttataacaggcattgcattcgggttgccaatcagctgggtgaaatagtaatcaataatcgacgatgagatcaggtacgttcccgatgggaagtagactatcgcaggagtcgtggtcgaggattgtctgcttgccgggccaaaccggccaccggcgcttatggccgcattgatcgcggccgtatcgtcggtcacaccatcacctatgctcactttagtacgtctcaggtagtagcgatccttcaatgcacacctatagctccgtagtctttcacgtttcggaagacttggtagccagaagggttcgagttgaaggctgcgactccttggtgggcgatgtctgctagccagtacgcagcgtctgctgctgccacggctgcaacaggagagttgaccacggcgaccttggtctcgaagcttacagcagccgaggcagtctttgttgaagcaccgaaggaagtatactgctcaaaagggagcatggcagagctgactatagcatccacagcggggatctctagtagctgtgcattggcacaagccaccaaagagaaatacttgatcacaaaagaataatacatcttgaccctgaatcattaaagaggtaagttggcgaggcaggtgctttcgattcacgggctatggaagcatgggcaacagaagccggggacaacgtggtttatgtatgtatagcgacctggacgatgctgacagtagacacaatcggataatgcaggcatgcgcatgacagaaaaggggtagagtcaatgaccctgtatcttcagccgaaagaaaagcaaattaaggaatcccaccccgaaataccactcaagacggggaaatatatagcgagtgactgcagaccaaggatatccattggctatttatttccgaggaggtcaattttcccgtcatgccctgttctctgtttcatgtcctggaggtgtcctagtggaaatgagaatgtgaataaatggcgcagatcttttccccacaagagatgaagtaccctgcctctacctgcatgtcagccaatagccaatcgatgtctacacagcatagagcccgagctaaactgtgagtttggcgtgggtgtttcctgataggaatggaatgtgactagttgagaattccacccttcgcagtatgtgatatgtgatatgtgacttatgggtgtgtgtgaccggttggtcagagagtctaatcattcagggatttatgctcataacctttcttgggattcaaagtgtcctaactttgactaacttaaatgaaattaaggtcagcagacccatggaacgccatgctttaagtgcggggagacgagaccgaaggctcaggtacttccgtcttataggtcacactcaccttcgtttcccttgactcgaacattgtgatactcaagtggcagacttagctaggtcgggttttccggtcacccgcaaggcgtccagcccactcagtgattcttagcctcttgtgttctcagagtgtacacatgcatcacgcagagtccctttgtatacttgctcggcggtgcggaacatcaggaggtacttgaacccactagctagaattgttatatgcatagatttagactctgcttgatataaaagaatccatcatgctcttttcgagctccagtgtgccttgtaatattggtggaacggatctttcttccgctggtcaacgtcggcgacatcatgaagtgagcgtggcttcgatttgagtataaagatatccccctgtgctgtcaattcatttgctagaaaatgggccgatctcattcgagaaaatcatgacaatcgtattacatcccctttgtccaatgcaggcagacaatagtttgtaaagtcgaaccttgctgccaagaaataccacgtgactcgttcttgtccgccttggatgcttcctgcaaaaaaaaaaatattatagtcgtgcctcctccattattgtgttgttggacatctcaagattcgaagacaaatatcatcactgacagcaataaaccatcgacctgtcttcgaccttactttcgccaactcgagagctccttcgtcctgctgacagcttcctgcgcgacagatcgcgaacgtgtcacggaaccgcgaataccaccggacaaccacatcgaagacgctagagacaaatgggtttcgctctctccgcgattgacaatatctaagtggaggataacaatcatcaaagctgttactctttcgagtcggtgtggagttggaaagagcctcgccgtacacggaaagctccctacttcgattgccgccagtgagggaactcatcaggcgccataccgaggtccactcttgcatcaagcttgattcacgtctttaaccctggtcacctagattccgaaggttacgatacgaggcggttcgagcttacaatcatacaaccaacagtggtcttcatacactcaatatgttgaaacgtggagctcaaggccctcaggggtccaaggaagacgagggtgctttcggaatggccagcaccccggatgacaagccccaccgagccacagcggcccagttagccagtagaaagtaagtaataactcaggtagcgtttggatgaccacaaactgaccgaagatctctttgcaactttcaggatcaagaatgttcgctcacgccgggctcctactcccacaaccggtggaggcgcatccgatgcggcttcgttcaaccctttcgcatccgcggccccggcaccagcgcctacccagactgggttcacattcggccagactcagagccagagcttccctgggacaaactcgggccccggccagggtggaatcttctcatcaggcactaacggccagaccggtggtcaggcgtctttcaacttcggctcgggcccaacctcatttggatctgcaccgtcgagcaatcctttttctgttgacacatcatttggcggaactacccagtcaagtaccaatggattcagttttgggggattcaacgccggaaaccaggccactccgtcgttcggtgggttcggagcgcagcagaacacaggcactccagcaaagcccgtcctatttgggcagtctacaacacatatgacttcgcctgccgatgagaacatgcaaacttcgcctgataacaagcccaagggggcttccatcttttcacataagccagctgcacctgagaaacctgccgacaaacctgcggagacccagcctttcaaaccgcttttcggatcaacacccgccgcttcgaagcctttcggtacagagaaaccgcagcaaacattcaacaatccatttgcgaaccttccagggcagaatgcgtccagcaatttatttgcaccaaagacagctacatctgagaaacctgccgagaagcctgcggagacccagcctttcaagccgcttttcggatcaacgcccgccgcttcgaagcctttcggtgcagagaaaccgcagcaaacattcaacaatccatttgcgaacattccagggcaggctccaaccagcagtactaacctgtttgccccgaaaataacggcagctgagcaaactcctgccaaacctgctgaggcggcaatgccctttggtactcttttcgggtccacctccagctcccaaccctcggggcctgctagcaatctatttgcgcccaagccagcggcagaagaaccaaaggcgagcaatccatttgcgagcattccagtgccgagttcatcaggcaatttgtcctcaccgaaggttactgagaaaactaccgaagcacaaccgttcaagcctctgttcggtacacctacgacatcgaaagctgtggagactggaacgcctgcaccagcatttggcaatttgttctccccaaagccggtcgctgaaaacgcggctgcaaagcctgcagcagatcagccgttcaagtccatgtttggtacacctgcggtgtcgaaagcctcggaagccgggaaagaacagactgcttcacccgcatttggtaatatgttctcaccaaagccggttgttgatagtacggctggaaatctatccgagggcaagccgttcaattccatgtttggaacgcctacaaaggctgaaaaagaacaatcagcggcaagcagcgtttttacaccgaaggtgacaagtgaagcgcagactcctatacctgcgaagacctcacaattcggctcaattttcggggcgtctcctgcgtcgaagcttggaaaagaaaagacagcccaggcaacacctagcaacccattcgcgaaccttccagggcagaacgcattcagcaatccattctcgccaaagccggcagagcaggctgcaaaggcccaagcaccgagtacatctctctttggtgcaagtacggcaattgacaacaataagcagaataaggacattgagggtaataaagacaataaggtcgcagctctgaatagcccattgaccaactcattcaccccggggcctaaggtgtcgaacggaccccaaacggaaggtgcgacgactgccacccctcgtgtgtcgttcgcgcacttttcacatgacaacaaaaattcgtcgtctttacctgttccttcttcttccacctcttctctgccctcctccacaacttctactgttcccaacacgttcactgcttcagaccctgacagtcttttcccaccaactgatcatcctgtatctttggactatcctgagtcaactgaagacttcgacagtatgccactcaaacgtcttttcccagaaaagaatcgggacgaactccgcacgcgagcttctttgctcaggaatatcggtgtcttgaccgagtcgttcaagcgtgagatcgtcaaatgtgaccccacaaaagagaatatcgacgatatcctcattctttacgctgaacttcgccgtgagctaggcgtccccattggatcaatcaaacccggggaaccggccaaacgtgccaccattcaccaacgcgccacatggaacgaaggtgccgccgccaaagatgctgccgtcaaagatgcgccaaatggatacgcacctcctcggaacccgacccctcccacctttgtacctcctgctcttgatggcacgccctcatcttcttccaccaagccttctggtgggtctactacttcctccaagttcgcccaatcgttctccgctccaacccctgctccagcaaatacttctgtttccacctccaatgctggtccttcgtcctcagccgcggctcctgtctcggttgctcctgtcactttggctgagccctctcctccgactaccgcccccaatgctactcctgtagccactcctaccgtcgagactcccaagcttggtgatgcagccacttcgactgccacccctgctttccaaattcccaagtttggcgatgcagccacttcgaacgccactcctgctttccaaatccctaagtttggcgatgcagtcacttcaactagtgcccctgctttcaaaattcccaagttcggtagtggagctactggcactgattttgcggcgcagttcaaatcagtgtcggacaagaccctagccgaagcgaaggccaagagaaaggccgaagagtttgactccgatgaggaggatgaagctgaatgggagcgtaaagatgaggaacgtcaacgcgagaagcgcgctcaactcgaagctgcagctaataagcgttccgtttatgtccccggcgtgggtttcaagttcgctgatgataacactgctccacaggacgttgaggagcctgctacatctgccaccccatcaacccctccctctctgttccctccttttactgctccttcaaccgcttctactaccaatggtaccccctcttcctcacaataccagccccggttccctagatcatctcctcaatcctccgaattctcaactctcgtcgggacagccactcgttcgcctgcggatgctgcactctttgggaccaagcctggacctccgcctccttccttgagtgcaggccctccaagctcctccgtcggctcttcgatattcagcggatcggtcagaaagccggttccagcctcgcagaacattttcggcaagttgaagccgacctcgccgaaacgcaaggcgtctgcggatgaaagcgacaacgacgatgattcccccccaaagaagactaagtcttcccacaacattttcggcggaccccagccgacctcgcagaacattttcggtgggctgaagccgacctccccaaaacgcaaggcatctgtagatgaaagtgacaaccaggataattctctcgccaaaaagacaaagccgtcgcctccccctccttctgcgggcgccagtatgtttggacgggcgtccactgccccatcgccggccccttcaaccaatgtctcttcacagcccgcgatggccactccctcggccacttcctcggctcctcccactcaatcgatttccaccgctactgaagatgaggacggtgaacctggtgaaatcttcgatctgacaaagggcaacagcggcgaggaggaggaaaccgtcatgttcgaagagaccacccgtattttcaaacttacgggcacctggcagcccaaaggaaccggtccccttcgcgttctgaagcaccctgtcactggacgtgcacgcatcgtcgcccgtgccgatccaagtggaaatgttatcttgaacgctcccctgatgaaacagttcgactacaagagtaactctaacagggttcagttgctagagcccaaccagaccgggggattcacgcaatgtacagttcgaattccggctgaaagaatgcaagagttcctccaactggtcaacgagatcaagacctagatctctttttatctcttccccattttttcttcatctttgttctcccttccgggggtgtatgctaattcccaagcgcatggccatggtttgcatttgcgtgttctgcctttatggttcggtttctttttgatctcttgctttttgttgttgtttttctttgtgcatcgacccctccccttggacaaagttggcccggcttcacgccgtgggccagcttcaagcccaatagcatccgcctctttccttttgaacccagtcagggcccgggtgagtatctccctgggcgccacgggcttcaagtcggacagagtcggcgcggcttcacacagtcggtctctttttctttgagcctagttagggcccgggtgagtttctccctgggtgccacgggctccagaaaacgtcggcgcggcttcactggcaatgggccagcttccagtccaatggcatcggtctcctttgtgagctctgttagggcacgggtgagtatctccctggacaccacgagctccaagtcggatttcctttttttattgaagataatggggtctacattgtatttctgtgaaggtgaataaaaattgatctttttttctaagcatacctcgtaaatacatgtcagtaaatatacatcaattaactaaatgaagtcgatcataacaaagaccctgagaccctgagaccctgcggctgtgattttcgaggggccgagactcgggtggcggcctaaaaacccgcctatttaagacatcgctcttctttccagttctctccccgttccccttttattttcttctgcttctcagctgtcactcgttaaattttcacgctcgttcaaccgtccaaaaatgaaaaccttcgctctttctttcctcctaggcctcgccagcctcgctacggctcgcactgacctgcaaggctgcgtctcgtcggaagtcatagtcgagcaatactacgccagttacatctggtacgtccctggcaccggcgagatctgctcgttcctcgactgcggcggtggtcgtgcgccgccaaagaccaaccaaccgggatgtccactatacagcggaaccgcaacgcttactcccgactacctggcgggctggggacccaatggcaaacaggctgcctctacaagcaccgtggcgtcaacttcttcggcgacagccgcgtcgaccactgatgttgtgctcgcttctgccacgcagacttctgaggcgtcggtgtcggacttgtattccgcgtcttccgctttcgcttctttttcttcgtctgattcttcttctgattctggttcttcttcttcgtcttccccgtccagcactcaagctgctgatagcatgatcacggctgctccttcttctctcgccccggtcgcttcttcgttgaagatttccacctcgtcggcctcatctaccggtaacgctacctcttctgctgctgcggcgaccagctcgcccgctttcaatgctgccactatccccgcctctaatgttgccggtatcatggccgtgcttgccgctatggtcggagttatggtgctgtaatttcaacttgattttgtacttataccttgtggaagtcggatttgtacttagtttttggagagaggagacgggcttgatttagataaatactcagaaatatacccacttgcggaacaaccccctattccttgtccatagcatgtcacaccactgtcccacggcaggagaagagtttgagccgcatcgccgatctgcacgacccgccctcttggcgagactctctccacatttgaagtcggggagatggtccgtgggaatgactcgacctgtatattctagctgacccgggatagagcctgtctgtctcttgaggtcactggtattgcaaacatggcttgaagtaaggggtaattgagtttgagatgcagccatgtcgtgtttttgaaataaaaaatcactagatgtagtacgttaccaagatttctttacttctagcgatctttagttaggaagtggaaggagataattattacattgaggtatgtacaagcagatcgaaataaccgaatctcggggacggactccgttcggtccgctgcaggcccaatcaactatattgcccataaatcggtggcatctcaccgaaaggaaacagcatatcgaggggacaatctatcatgaagttgtagtccatcggggcggcatttgttggcagggaggtttgttccagggcttcttttctccgccgatgcatccttttaatcgttaccgcgcgattggtcatccttccaaatatctccggcagttcagcagacttggggtcttgcgcaagagcctgttcgaagaatggaagttcttcttcgagcttgccagttatacgatcaacggtctggtcgaagtccattatgctttccacgtatgcgcggtcccatccgggatggtcatatagagatagctgggaaagagtgacgattgccttgccaaattgacacattatggtgaaggggaagaaagggaaaagagcagaggggagagagaggatgttttgcaaaaaggaggttgtcgcttccacgcagcggaaaagaagatccagttgtatgagaggatgatcaccgtagttaggtttgggttcgttaataagcgcaacccggtaaagatgtagctcgagcgtgttgtaatgaagctgtagaatggctgtcgttgttgtcagatcattgttagattgtgcgcgaaaacagcacaacttaccattgtgtggtgcctgactcggcatgcgagctttgagttgcttaagttcggcttcaagccatcgtatgcttagaccaagtggcgggggcgctgatgaacccgatgaagaatggaggtcggtgtaatatagtgtgtgatggatcttgtctgccagtttcatcgctcggactagctgtacgagagaagcatcggtgggatactctgcgacctggtctaggacattgcagcattcgtcggtgtatcttgtaaagcgaataatcggccccaggtcttttacacatgttgagagcctttgaagaattagcttatggccagcaagaccaagggtcatacacacatggtagtcagataataacacccaagataggttcgtcgctcttccaacgtccgaaccggagtatgagagtcatcatttatagattccttcaaataactcagagcatagttcaagttcttctggtaattcagttcttgatttaggcccaaactgaaggattgcgccacgagtaagtgcacgaatgtatcaagctgggcagtgcttcggatagcttggcgaatctcctcttccgatttgagcacatcggggggttggttcctaggtcgcgggaaacgactgactgaaacgaaccaagccacattgatgagaagcccctgaagaagatccaggctatgttctcctctcatgacgatgtgctcggccacatattctttgactgcatgcacaatttctcgctgacgtggcgcgttttggcacgcgaccattgagatattcagatagaggaatggtttctctcgacgcagttcctctgctgtgatatccgggggcatcataaggaatggaaagagagggaacattctcttggagaatacttctatcaacagctggccttcaatttcatcgggagcagcagggttctcttcaaccgtagatgatgatctcgtttctgggccgctttctacccgttctctggtatttcgttccgaggcggccagcatggcgaccatacggtctaatttagcctcaagtgcggcaacatctctactagagtgtcagcggtttcgcctgataatggtggacacttagtgaacacttacgagccacttgcgacggatttcttctcacgacgatgggcgccgggtgcttgcttttggcattcttttctcaagcgacgacaacttagaaaagttaatatggatcaagtataaaatcaactatatgctcaccgtttacaaggaccttcggtttccgggaaacatcgtactttggccttggcacaggttatgcatgccttaggatgacgggctccaacttcatccatgacgtcttagcgtacactaacaaggccaacggtgagtcggatcgagttaacgagatacaggagcagtcagatgatgaacaagttaacaactcgagtccgatgtgtctgactgggaagaaatgaaggaacggaactccgcacttgatcgcatttttattggtcaagttgtatcatagtgggcctcagctactatataaccccctttttatatcagggctatgctatgccttgccataacttcatacggattgtcaaatacctccttctcattctgtatatattcatacgtagaaagtaagaggggttctctctgtatgcctaggacgatgcaatatagcacattcgacaagtatttgagcagtcgcctaggttgaacattgaacgccttgttgtgtacgtagagcgagacgatagctgcgtcattggtgagcgtatgttctcgggagtcagacgacttcgcctgtcgtgtggtcggtgatttcgtcgttctttagcggctccatcaccttccttccatgttgccctttgtgagtgttgcaatcatctccgtcaccgtcgcctgtgaccaaactttggaccagtcaaggtagtattttcttccttgcttctcagatcaataaatgcctaagcacctcaatacctatgcttctatctcatatactaggtagttctctggcttagaacctggttggtctcatcgctgcttctcattccccactatgtttcatatctctagatgcattgctcccagcgtaaagtatgccagattaggcgaaaaatccgtaatggtcgatcggaccctaggtagtctgagaagtctcgcagacgtccataagaacttagtggcatagccgcatagccccgattgacgatttgcttgcacttatggtatttcggtatgcaatacaagcgcgttacgtcctaactactaggaatatggtggtcattactagatgctaatttctgcttggcatcatcccaattaggcaggtagggcttagggtttcattgctttgctctaagcctgcttagtaacctataaatgcaggtctgtttcccgctaatcctaactaattctactccgtagctgaattgctgtccaagggcgcctggtgctgcttggtgttggggtagttaggtgatactccgtggagatgccccaaattgggggtccctagtgcctaggcgaagggacccatagaagtggtgcttcggagtcggaattgagatatcttagtatcagaagcattgtgagcaattagcggcatctaagcagagattaaggtcgagatcacgcatattcgggtataaaatggagaaactcagtatcggaatcatatatgaggttcaaaagctcattgacatatgaataccagttagtaaatattccgtagaggatctattaccccaaatagtggaccctgggatgcttcctgggagtaaatgcattactcaatagagtgacctgctgaacgtctctacttcggatcaaaaagaggcctaaaataccactggactccaataattgaagccggataagattaccagcctatctacacggaattagtaagaaccaagtcgaaattactccaacatctccaacatcgacctcacgtacaacaatttgagcgagtaatgttgaaatctgcttatcggcgaaatagccgtccccgcaattcgcaacattcgcaacgcgcaactccgatatcattccagtcattctaatagtcccctcacctccaactcttcttcttcctactcctaatcatggctaccttcttgaaacagcccctcaaattggctcttgtccagctcgcatcaggtttgacttccaagatctgtcaatgttttcccagctgaccgaaccatctaggagcggacaaggccgtgaacctctctcatgctcggagcaaagtcctggaagctgcaaaggctggcgcgaaattgatcgtccttcccgagtgcttcaactcaccctatggcacgaatttcttccccaaatacgccgagaccctccttccctctcctcccacgattgaacaatcgccctccttccacgccctgtcggccatcgccgtagaggcaaatgcataccttgtcggcgggagtattcccgagctggagccatcaacaaagaagtactacaatacctcgttggtgttctcgccgacgggcgcgttgattggcactcatcgcaagactcatctgtttgacattgatatcccgggcaagattaagttcaaggagagcgatgtactttcacctggcaacgagctgacagtcattgatctcccggagtatggaaagatcggtctcgccatctgctacgatattcgtttcccagaggcagcgatgatcgccgcccgccagggcgctttcctcctcgtctacccggcggccttcaacaccaccaccggtcctttgcattggtcgctccttgctcgtgcccgggctgttgataaccagtcatatgtggcactctgcagcccggcgcgtgatctcgatgccgcctaccacgcctatggtcacagcttggtcgctaacccaagcgcaattattctctccgaggctgaagataaggagactattatttacgctgacttggataacgattccattgcggacattcgcagtggaattcccatctccacccagcgccgatttgatctttatcccgatgtgagcgcaggccagaaatagattttgggagactgcgaaggatttttattagaattctatctagagaatatagtctcaacttgaacattcagagaacttcattaaatcactataacagagattgaataaggtggttattgcctgaggcatcgatatccacagccacgatatcattggctgtaaatggccccactccgtccaatcaaaccccgcacaggcaagcgagaccacactgaatttcactcgaaaatcgaccgcgaactcttcttctgacaatcgatcacctccgcccaccgtcgaccaccccttcagtcagtctattcaaatcaccactccgaatttatcctctaaccttctccgcagagatgtccaacgtcaagactggcaacaagcgctcggctatcgccgatgtggtgactcgcgagtacaccatcaacctgcacaagcgagtatgttgaacacaaaccctttccctgtctacctgcgacgattcgaatacgattcagttctggaggcatatattggacagagaacaagaacctttttcctgaaaatggaatttgttacggaaaagaatgtgtgtggtgtggattggtgtgtgtgtgcatccggggtcgaatgggaaaccaatcccccctatgtcacactaccaccctcaccatggcctgcagagaaatctgcaggtaggacatggcgctttcgtcttttgtctgcttcgcgatagagacagccgagcggagatcttgaaaaagtcttcgctcgcatccacacatatccgcacccggaacacaaaagaagaattagttttatgaagtccactatggccgaaagaccagaacattcatcgcgcagagttttctctagcagatggcattcgggcggaagactgattgcaacttcttttccggaattatagtgccacggcgtcagcttcaagaagcgtgctcctaaggccatcaaggagatccgcgccttcgctacgcaggctatggtaagtttgagcgatctcccctgaccccgctcgggaatcagttcgctaacatgctcaactcaccaacagggcaccaaggacgtccgcgtcgacccccagctgaacaagaaggtctgggaagccggtatcaagggcgttcccttccgtatccgtgtccgcatctcccgcaagcgtaacgacgaggagaacgccaccgagcgtctctactcccacgtccaggccgtcaacgtcaaggaccccaagggcctccacaccaccaacgtcgatgacgcttaaatgtgtcgcttttcgttagcatctatgattccatgttccctgctggggtgtggtcggggttttacaaaaatacaaaatacctttccctttggggccttcttatacattatgtcatagtatcgtagtattccactttgattagcatgtcctagcaccaggagcaacttgacagcaggattattcaaggtcgctcaattacacctatgtctccactttcatatagtttagatcccttggaacctggaggccaacacgtgcattgttcgctcggcatacaacttacgtagactccggggccttcatgcaagtgagtactaagtctctagaaatcatcatttcctttacggtacctattgctttcacgcgatgagaaataagccgttatgttcactgtccaagttgatggtccaattaggattaggcaggggacccgtccatatacaacacctaaggtcttggaagaggattgtgaaaggaaagctagtggtgtttcttagctgatctagggtgtatgtcctagcatggagcaaataatattaacaattataaataaagtacaactaccgctcaggatttcgagtacgaagaaaggtgaaaaaatatgttgctgtatatatcggtgccgctgctttatggtggcgcccagggtcttgctcactgtattccacagcacaggtgatcactcagtgagcagtgagcacttagggtatgcttaataatgtccaaatattgctcaattagcactcagtaagcgctcaggatatgctcagtctatgctcagtctatgctcagtcagcgctcaggtcgaaagaatgatctaggaagccagggaaactgagcgcactatactaagtatgcgaacctttccatttcggcattcgtaagaataaaatcggtctcattgcgctgcttggggcgaaggtatacgtcctcgaaatcgatcttgagggatccgccaattttagttgggtgtcgaacaatctccatcttttgggtgggcaaaggatttgctccatgtgctggaggatcccaattctcgatggtgatcttgctccgagggtaaactgtgattgagaagaccacattgacctggccgttcccctgggtgtgccaccattgtatgtcatgttcaagctgtgagattcctctgatttctcgagaacgaactgttgagatcagcaaaatatacctaggtatataatctttttatctctgttttctaatcgcttcggtactaaagagcagcacatgtcacctcgaaaatttctcattgttccacctctgcgaataaagacgaccacgaattgaaccagtcggccgatgataggccatcgaaccccaacgagtccattacatttgatagcacgccatccccttggttatgattggttgcacgacttgtgtagtggcttgtattcgaagccctggctccgatgcttgcggcttcagttccccaatcattgacccaggttttaaaaaggtcatagcctaaatcctcggtcgacatcttcccagggctgtgtcccattctgtggtgaagagatttctgtagagattcaatacaagcaaccacagatggcgcagagcccacccccattgacatgaccccaaacaaccggagtccggtagataacgcattccgaagcttcgccgtgcgtgtcgagattgattgtgcaagaatcgccagcaacgccgcccgacatgcactaaattccgtgaaggacacccgggcaagacctatcttgtcatcgagcagagtgcacaggttaacgacctcaaacgaggctttcacacaatcagcttctagtatcgactttcctggtagatcatcctctatatcgacggcttctggattgtggaaaaaggaagttgtgaccctctcaatcaaaggataccagcctaggaagattctaatcaaacagcagtcgagttgcaggtgaatggtggtgcggaaatagccacttgatggaccgaggtctctgcacaaccctccgtttggtaggctggcccaccaagccagaaatgattctcgttgcgaaagtaaattgtccaagcattgctttttatggtctgtggatgctttccgtagcgatgcactaaaggagtatgagtagcagttcacttatcgcttaagcattctccttacatctcagtggcgaagttcgccaggttcgatgttaaacaaatagaagttatcatgtttgaaaagttggacgggtcatttgctggtcgcaagctagggatatttgtgggaaatgcagcatcaacttccgcaacattcagagaagtgggcttcccatgtaatatcccgatgcgcctgattttattgtcatcatgggttatcagtacacgaatctaatataactgcatacctttccagggaatacgtggtccagaataccctgttcctaatttcgatggtttctgtatcgagatcgtgcccggtgtatcgcctatgcattccattttggactgccattctcaatgccaaccctaaataggtgaatgatagaccagatgcatcgatatggataaagtaagtccccattaagaggcatgcttgaacagtgcgcagtgaggccgaagcaattataaggggcagaagtttcgacgcgaatcggtagaatttgagtcccagttcgtcttcggagaattgagtaccgcctttatgatctggtacagattggatctttcgatcagaacgaacgcaccaaggagaacccatgtgcgcaaagcgagtgccgatagccagtgtcattagcaagacgcatacagagcttgcgtcgggatgtggtaactgcatttgagccgagtatgagtagcataaatttagtgtctcgcagagctggctttgttccacgtagaaatcatttgtctgggcataattgaaaaaagagttgataagaaattcagcaacatcgcgcggagggaggcactccaacgacgaggaaatcaagcctgtttcgctttgcaatggatgcgcactccactgatccccaaataggtctgttggctcatataccttcatcaatcagttagtcaaaggggcttactgagaaatgccttttggacaaggttgtcagacaatacctctgggagtgtgttacggaggctttggtggatgacctgttgcattctcatagacagagacacataggagagctcacctgcgtactctttggcccacaacgaagtcagctcattggtgtagaagacgaaaacagtatcgcagctttgtagtaggccagactcacgtgttgtcgtgttcgactggggactgatggcaaattctgtatcttctgccaagcctattgacataatttcattcgactgaccagatttcacctgtccagtggtacttgatttgctgatttccaaagccctctctcgcagcgactgcaattcgagcgatatatttgggacataatgcttcaatagtaactccatccagtgaattcgttctctttcgtctgttcggtcaaactcttctctaaaacgtctgtgatgcatatgagcgacatctggagaagcaatagatctagaaattaccggtcggaatgtgcggcttcgaagatacattgctgtccaaatcgagaacatcgagagcaaggacgcccgccctcgcatttttccttggccttacggcaggcaatgcatctgaggatacgataaatcgtcagtgacaagctgtctaccaggatgccatcctacaagaactgcaggaaccaggaagcgggaccgtctcacgctcgagtagctcgtttccgaagttcttgtgggacaggatgccgccatcgtcggccctttctagaatcatccatggctggttatctcgtcttctagcacatgaatgatggaatctgagaatgaggatgagagttctttgttcaccgccctgatcatgagatcatgtcacgtgggaagattgtatgaattgtacctgcccgctaactcaacatcttcatgttaccatttcataagatgtttagtcaattcgttacgcgtcgcctcgcagaaaattacggaaactttcgatggggactgtaaaccaaatacagtagtggggcagtggggcgggagagtgtacccggatccactaagtgtttccggcaggtacaatcatatcatctacaatacaaagcgtgatggggacacggtgattttgaggattttaacagagtaagaggaattgaaaggcactggaattgatttgttcaaaatgaagagtgcaggacttaagtatcgtgataaaatagcggtcaatttcgacttcttaagcaagcaggtcttcgcgtctcgtatacgactcatcgacattacaggaccttgtatattgtattcgtaaatgcgctatgaagttgaactataactagataatatttgccattgaaaaaaaaaaaagcagattcaaaaagtcatacatgtaaatcaatccgcaaatcatcgtccactggtattgagcagccattgtggcatttcttttgcataggtgcctcgacatgccgcttcgacacattgcatgagacttccaaagaaaaactttcgtcctgtcagaccaggtccataatgagcatatttcccagaattagtcatgatggcattctcagttgtcaggatcgttggtttcgtgatcatacaccagcaagtgtctgtaatgaattcgacgccaaagttctccaattgttcaacccaacccgcttggctggctaagctataggaagaccgcccacatgtcaccacgatggaaacatcttgtgatttagcaaggccttcacaaaggagagccaatgtcttgatttcttttattgagaaatgcgggttccccagggagacgagatcgatggactgatgctcatgtgcactgttgagcttctgccagggctcaatcagatcttccattctaacggcgacggacggcacctggtgtgtttcgtccatgatattgctgagcaaggctgcctcgggggtgacacccagcatatgaaacatgggcgcgctagaaacggttgcaaacgcagccccaaaggctttcaaatcatctttggatggcgccaaattctgtagtccaataaccacgggaatgcgatttgcagcaatgcttccgacgtggtatcccaatatagggaaaaaggaatcgtcaataccctccacatcctggagatcaactgtcacgatgagtgacgccattctgttgatgtcaacatgcggtcctgccttaggagcgcgcccagtaagggcaatgcatatatccagataatcgggatacttcatggtcctagccccaagtacgctattggcatagacaactgcattagattctgcccaagcgacttgctccccttttcttggtgctgattgcagctgatatggcgcgcaggtaaaggttggcttagagcccatgtcggtgtatgccttcgctaattttgcggccgcttccccaaatgaagaatcgacaccttgatcacgccatcgctcttgatcgatcgagatggaattgagcgtggtaggaactcggaccttccctccccagtcccggagcttctctgcaaactgaagagacccggagcctgtataaacacagccatccacatgaacttgagtcacattcatcagttcgtgggctcctaggaggcctgccatccgcaaaacaatccgaattgcgatacgagaggcctccccgtggagtccttgaagcagttctttgtcgaaattcgagagctgcacatcctcagcaaaagagcctccgtttggctctttttggagctctgttcgtgtgtcactgaagactctatcggaaacgcggtgggagtcgacgtagatagcattccctttcattctcaacattgcccgaaaatccttcggtttcaatacgacaaccggtatggtcttcccaaaaatctcctccgagaccaacaccccgagagtgagaatatcctcctgtctttcaaaaaggattgctcttggtcctttcttgttcaggagaagttccaacatgacaccacttccagagcatgaaccacgaccactggggatagcaaggacagtatcctggagatggtagccactcaaatcgtgatgacggtcaataatctctcctgtctgaggattgactccaccccagaagctgagctctaagtcacttgcgatgagtgtgccgcaagccttgcctttcacatgagctgtaccctcaacaactaggccaacgtgcggactcatgttcgaatggagatctctgaatagccggtctccgatgaggtcttgtatgcctcgaacagtggttacttgggtgggcaaattgagtgagagaatatcgagttgatcgcttatctcttcggggtatatccgcgagggactgatatcacaatcatgtacgcctaggtcgaccagtctcgcacccacaatataattggagtattacccttgagagcagataagggcagcggatctttgcctcggaattatcacaattcctttggcttccccagttgccatctccagtaagcctgtaaacccggaacataaagagtggaaacaatgggcgggtgtgtacccggacccaccaccggctgaaacaccgaaagtctcgttggcctcaaccccggcagtacagcagtgaataggcgcaagtccgcaaaacacctatttggaccaccgccgagtattaacgctctgctcgtgtaccgagttcttttggagagttagagaatttattgacatttttctgccacatatacaattgccttaccaccgtatttccgtcaacttctactgcccgaaatgcccgagttttggaatttatcttcccttcagtccagaccgccttccgtgcacctttttctagaccgaggaataaaagactggcatcggatcgccataaaagcctaacgctgcaagggtagcaacttgcctccacaattttagctcatcttggaagtgttatcccaattcgatttgactatcacccgggccagccgcactggagataagtcctctattcccgggaatgcgtcatcaggtgatgtctctcgaaaggcatgcctccggaccgggggtgcagtggctgaaggtgtggatgtatggtacatagcagcccataacagtggagccccctggtaagatacaataacacttgatttgccataggctggtggaacttgcccgaaccatttggggattctagtgactgacgtaatgcgagaggtttctctacactccaaaacataggttacatagggttctgggatatgttctgtaatacgttcccgccgcgagcggggttttcggccgaatgcgagaaatcgcattcgcatataaaagcgcactgttctcatagctgagggattacatcagtcgagcttcatcactctagtcatatcgtttggaaagaggaaggattcactgcaaatttccataatgtgtgccaaaatactactggcgtttgatctgtatggcacattgctgtccacggaatcgattcaaagtcatctgcagatacatttcgagccagaaattgcaagggcaatttcggaaaaatggagacgtttccaattggaatatacttggaggctgaatagcatgtgtgagctgcctagaatgttccttgcatcgatagcagagctgactcatgatagcacgttacgaagatttcaccgaggtcactcggaattccttgttgcatgcacttgcggagaacggtcaatcgcttgatgacgcgagtatatcacagttgatgatggcttatgataatctgtctgccttccctgatgtcgcgccagcgttggataaactgagccaggaaagccttttcaagccggttatcttctccaatggtagtaatgtaatggtgtcgaattcggtgaatcgttgcctctcgcagcatgccagcatttttcacgggcttctcacggcagacgacatacaacgttacaaaccctctcgactattctatcagcgtctagctgagcaattcggcaagggacttgcaaacgaagatatatggattatcagcgctaatccgttcgatattgtcggatcacgcaacatgggcatgcgtgcggtttgggtcgatcgagcaggctcaggctggaaagacgctgtgatcccggatctgaagcccacactggtcgttcatagtctccaagatgttaccgacaagatccaagcctatatcaagtgattgtccatcgaagaatctaccatgggcgaggggaccagcacaatcggttcttgatccgtatcatacggtcctcggcctttctcgagggtaccccaccgtgtttcgagcacaatttcgctcgctcgtgtttgaaatagacgaattgttgtcttttgattgatcaatatgaagattgtttggcgtcacatctgcgggctcgttcaaaatggtcaccgtaatagaagctgattggaagacgtcacatgtgagcgtagaaagacgccctatcgccgctccatgtggaagaggcttcgtaatgtgagggaaacgaataatttctcaccagtaccgctgtcttcgctgcgtctgctaccgttcctctaccatcttagtttgtcccaggtcatttgggctagatctgatactgcgttcctagaccgcagtgccaggtaacccatcatgtccagacaattttcttgtcccccttgactgtttgaggtcacctaaaaagctattatttaaatgacctcctatgctctacttgctaaaaatcagtcttggactaattcctttcattttgagctgcctgctgagctgacggcagtcctgtagagtggcacaaaattaaagaatacattacatcgaacgaataactgttcatcatgaggaaaatccaatcgaaatcactgtttttggaaatcctcgcgtatgatacgtactataggcaatatttttcctatctcatcattcacagaacactcaccaaccaatcttgagccaatttgaaacctgggtcacctcccatgtgggtctcattagggaaaagcttgacgagctttggctggccaaaatcaagaggtatcagtgtgtcttcggctggaaagaacccatcttttatcccctatcaaaatttgagatttaccatagcaataataattaccgccagggtggagaaaaacttacattgatcataagtagctgcgttgaattctgttccaatgtaccatctaggacaagggaataatcctgcatactattctgtttgaactcatcgaggctctcgtaaccccatttagacgtcagcgcaggggtcgccctgtaaacgttgttagtaattgatacaaaaacaccccaaagcaactatacctaaacgcatattcgtggtcgtcattgtgactaatccagtccgggctaaatgcttcatgcaccggagtcccttgggcgacgaccgaatgcaaacgatcagagtgggtatgtgccattctaactccgtaatagcttcccgtcgagaatgaccagactccaattcgtccggtatcatattgaggttggctttccatccaattgagcacactattccatagacgatccccggccaccgggtccgatcggttgcttggacagtcacctgttcctggcacctcggccacaacaacctcatatccctgattgacggcccattcggtcaatggattgaagtcaggccgaaattcgtcgacgccagtaacaaaaagaagaactgggtgtagtatggccgaggattccgaatctggaacatgtcggacagcaaccggaatcgtaggtccatccccattagcagcatatgtgtgatttatttgcacggaagagactggaggatcaaggtatctattaagaattcatgatcagtgcttagctaccacgccaaaggccaaaaatagagatcggggatttatatggctacttacttggcgctcttgaagtaagcatcgacctgcattctccaagcaagctcttttgtgggtataattggtgaaggatatcttgcaatacgtaagacaacagcagcacgactgtttctctgtcaatcagctccctttcccgagcggaatcattctttgcatgtcttgcaaagtgagcactggtacatacgtatacaaatctcccgcaatctgtgtattccggtgattttctgcttcctctgcccgggaaatgagatctctggcagttggaagaaaagcattcacatattcgtcagtatttgcatccgatatattatactgtagtaacatcaatatgaaaaccccccgaatactcataattgaagaccctttcagcttaccttgatcagatgatcaaatataggatcaaagtctgacacatttgcgtcataaaagggctcggcctgagcaatcgcctaggaagtttagccggaattcaatctccaataaaaaatgaaaaagtatgacaaatttaccaatggccgccacagctgattccacaagtaatcaatatttccatgttgaggttgtatgacatcaagatcctttcctaaaagccagtcactgcaagtcaagacctccgaggttgcagcactaaagagcatgctagcaacccaaggaagaatgccttttgaaaccattctagaactagatcaaaataaaaacgatgatagtaaaggcctgtagagatttactcgcttgctggaatatatcaaattgttgtctcttggtctatcttccatatataacttcacatctcgggttttcggagttaagagatgaaaatgttatatttttggggccatatccagtattcgccaagatttttcaaggcgtacagattgtcaaatgcctcggaaatagagccgggaacccatttatagccggttgctctgctaacatagttggccgacagcaaggacgtgcggctatgtacaatccctaggcattatctccgtgaaagttattcaacccaatgatgaatgattccaggaacgagtcaagccatcttgtgtccctgtttgtttctttctcaattcacttacgaaggcagcctatctactacagaggctcaggatctaatacagacacaaagaaagggaggagggagaggtcacaccagcggagcctaattttcctccctagactggaggtcgtcgacctccaacatgttcattatgtggacttattggccatcactgtaatatatgcccaactaagcaataatttccacatttggctggtaatcgcgatctatttgcggagtaataggattatgaccgggaggctactgtattgtggagcacgacggagctgccgcattaggtttactagtgacattttgattggtggatatattacggacgtaccgccaccaaacgatgccccaccactgatcgggcttaggaccttgtaaagtccgggggataaatgaccccgtgtatgagaacatgaggaatataaataagatatttctttgctctagtctctcacttttggaaccatcaaagcttctgaacattaaaaacacctattcatcatgtttgcccctgcttgtaccccaaaatcccatctcggccgttaccgtctcctcgcccccactgccagcgttaaggtcagtccattatgcttaggtgcaatgaacttcggtgaaggctggtaggtgcttgatatcaatcaacgctctctccaacgctacaattgtcaacaggaaagaacgactcggcgaatgcaacaaggatacatctttcaagatcctcgacacatactacggcaatgggggcaattttattgacacgtgagtcaaacaattgttgcttgtctctattgagatagacctaacgaacagaagagccaacgattaccaaaacgaagattcagagaaatggctcggcgagtggatggaagctcgcggtgtacgtgatcagattgttctcgccagcaagtataccactggctaccgcacccatgttccatctgagattcaggcaaactttgtcggtaataatgccaaaagtttaaagctgtcggttgatgctagtctcaagaagctcagaacggactatattgatctggtatggccactatgagataaaagaacctgttatagctcagcgtttgctaaattttggatgcagctctatgtccactggtgggattttagcacctccattgaagaagtcatgacctcactcaatcagctggtcctatccggaaaagtgctctacctaggcatcagcgatacacctgcctgggtcgtggtgaaagcaaaccaatgtgagctcacctaacctcgaccgacgaaaacacactaacaaaacccagacgcccgctaccacggcctacggcctttctccgtctaccaaggcagatggaatgccgcggcacgcgacttcgagcgagacatcatcccaatggccgcatctgaagggatgggtcttgcaccctggggcgtattagggcgtggcaacttcaaaagtcaagcgcaatgggaagaattttccaaatcaaagagccctgggcgcggcagcacagctacggatcaagaaattgcggtgtcgaaagttcttgagagtgtcgcaaagcgacacggggcggcgatgacaagtgtggcgctggcatatgtcctgcacaaggcgccttatgtaacgcctatcatcggcgggcggaaggttgagcacttagagagtaacatccaggcccttgggcttgatttgtcggatgaggatatcaaggagattgagggggcctatgagttcgatattgggttcccgatgaatttcttattccgtggagagaccaaggaggcgcatcctcgtaattcgacgcttcttaactcagccgctaagtttgattaccctgatttggtgcgtgctgtcaagcccaaagacctagatgcttaagccttggtcgtatttggattggttggccacgcggagagctggacatgtaattgaatgtcatctcaaatatagtcaaatcttgacagctacaaattccatactaaaacttcccaacccctctgggccttcctttaatctaattcatcattccgcctttaatcatgatctctgtggaactaatccaatatcgctggcttcatggttttatcaggacgaacgtattgtacttacaccaatgactagattgcgcatcaatacgttcaaccctttgaaagacaactcgtgcgggtgaggagtgtccgaagaatgctctttgtgatgggtttggctcccttttcaccttcgaaatggccaaactctgcgaacatagtggtatcttcatcttctgtatccttccgcatactagtaatttgctttgaagtctataagcatcgtcacggaggcaatcgagaaaccctaaaattctgttcggtatttaaaaagcatgattttttggctgaaatcaattcaattcgcgtgaagaccttcaactaagcacaatgtaacttggatttttaaggcacttagcttatcaatccgagaattttataactaaccaccctcctctcatttgtattaatgcaatatctctaagtaccacaggaccagttgaaaatgtaaattaaaaagctatataaccccaaagataatcaaaatcaaagcagagaaccgacgtcgaacagcaaagcatcgaacaccgtggaagccaaggcggtgagcgagagctctccaaactgccgacgtgaggacatcatatcagctctcttgcagtccgcatcaaccatcaacatctccaattccgtccgagtttacccaccttcctctttaacccagcataccgtcctctgtcagtgataccaacttaaacagcacacagatctccaccatggagtctaagatccccgacttcttgctcgagcagcaagcacaaggaagcccggagacacaaccctacttcctcaccttcgaagattactgggagcgcaaactatggcaccagcttacagactcgttggtcgagttcttccgcatgccagagagtgctccgcatcgcttagccctgtttaagacattcgtgctcagtttcgccgaccgaatcaaccagctcaagtttgtgtcgctgggattgatggcagcaacagaatgcgcaggttggtggtccacagtctagcccgaaagctcaaaaaatcaccatgatgagtgttcgattgcgttgatgtaagctaaccatctccctctagatgaccaagaacgactagctttcctcacatccctcgccaacaagacggatacgcccgacacacaggatgcatatgtctacgcgctcgctgacgtggccaacgtcaagctatcgctgaagcatctggaaggagcacagacggatctggccacctgccagcgggtgctagacacgttcgactcggtcgagactgttgtgcacgcgtcattctacaaagtgaatgcggactactaccacgtatgtgattcgacttatcctatgtccagccggacacggcactcaaactgaagctaacaccccctccaggctaagcaagaattcgcctccttctacaaaaacgccctcctctacctcgcctgcattgacctggaagaactcaccgagaccgagcgcgcatcgcgcgcgtacaacctcagcgtggcggccttggtatcagacacgatctacaacttcggagagctcctcctgcacccaattctggactcgctgacccagaccccgcacaactggctccgcgaccttctcttcgccttcaacaagggcgacctgactgcctacgatgtgctggccggtaacatcagcaagaacaagctgctggagtcacaccgggtattcctgtaccagaagatctcgctctcggcactgacggagatggtcttccaccgtccccctcatgaccgctctctctctttccaggctatcgcgtccgagaccaaggtgcagccggatgggatcgaacatctcgttatgaaggctttgtcgctgggtttgctgcgtgggtctattgatcaagttgcccaggttgcacagatccactgggttcagcccaaggttctggatatgaagcagattgatggcatgcgaaaccgtcttaaggaatgggatgctggtgttaatcagctcggtcactggatcgagggggctggtaaggatgtttgggctgcatagatgtcttatctcacttgtgttctgataagttctattataatgaatacaatggtgtcgttcttatggtggttccaatatatttttagttcgaatatgagtgagtctacatgtgatctacatgttttcctgactcgatatctacttcactcatcaaggaagaataagaagaataagacattcatagttctagaataacaaaccagaacaacttcattccgagaaaagaatctatatacacaactctccacatcccctttaatatccattaatcgaacactccaaagcagcaaaagtaggcggatcaatcccctcagtcctattatgacatcctttaggctgataatacaacttccaagtatcaaagcaatcacaatcagtctttgtaaaaaccgagcaatacccattcttgagcagccacgactcgggtttcacaagtttgctcgcatcacaactagtccacgtgaggctattagaagtccaccatttacaggtcacgcctgtctcggtgaacttgctattgaggcctccatggagcgccaagcagcccttgtcgccgaggtattctgtgttatagccctcgaggtggtagtagtcgccctggcagtttgcttggctgtatagtgtgatctcccacggtgccgtccagctatattgagacgcgcttgctttaggcgcggcttgtgttgttgttttttgggtagtagtttgttcagttgttgtagtgattttcgtggctttgatggtggtggttccggtagtgctggacttggagctggtgctggatttggaggtagcttttgagcctgcgccggtgttggtggattgctggactccggttgcctttgccttggtagtgacttcggacgtcggggcctctgtcgcccctttcacggtggctgtaggaccggcaggaggtgcacggtaaccctcgcaatataaatcggagacaccacattgaccccagaacgcacactggtagttgtcaggactagatctatacggggatatggactttacttacacatttggactcagcacatgggttcaaaccagggaggtcggcccattttgccggacgtgttgtgccaggtacctgtgggccgcaggttgcatgcggaagggccattggcatcggcggtttcccagcgctgagacaaatgaagtcgccctggtatagtcgtccgcatccgagccacgcccaggtgtttttattgaagctctcgatgtcggcctcggtgatgccgtgtgctttggcaatcagcgcacacgtatcataaccctggatgagatagacgaagcagtagccgtcgctggttggtaccgggacggcggctgtcgcgagacgcaggaagagaagccatagagcaaggaagtcgattcgaaagagacccatcttgttcttgtgtagacctgggagatacagccatttggtcgagtaacaaggctcattctttatatagattgatagagataatcgcggccgtgtaatcgaaactggatagagacgctgcatgaaagaaacagagctgtttccgagttagggcatgacgcatggaattggtcaggaacaatccaatattcatgcatgtgatgaatgtgagatgttagtattgttcaagggcctgacaaagactcggggaaatgtgtcgtatcggaagtttgacatcctggatgctttcattgttcgcttgaatcacccgtgcatgacctctctgatatagtatgcataaagttgggggcggtctttgtccaacctctcttaagctcttctagcgtcaaatgccgaatgttctttgatcgtaattggccgctgcgaagcgatagatgcttgggccttgagagtaagaatcagaaatcgagtcagttctttgaagacagggacggcgtggcaaatgaaacacattaaagagggcgtacacattcagagtacatatttgagcagaacatgtacgtacctagctacatttaaatgcacttggatgtgtatttgcattgcattggtattgaattggtgcctggacgtcagccgcagttgatatttggacttcctgctgccagtggtatccagcgcgctagtcatctttgtttctttgtcttggaagtagtacgtagattcctggactttatttattaatatcctaagcattggatcaatgcggcaaagcgcgtgacacaatgtacaatatagtaatcagaaaatcgacgaccccagcaacacgcagccaatcaaccaagccggccaccacacacaccaaacaacgacctgggtccacataccccaaacatcccaaccgaaagccgcctgggtgaggacagtctcgactgagacccccatataccagcagacgccaaggagaacagctggcggggagacgaggttgagaagcaccagacccagactggaggttgccaagcggaatggcacggagcctcgcaggcgagggatgaagctaagtggcgcgcagagcagaccaatcatgaatgaaagggagaagttgagggtggcgagggttgagagggagagacccagtaggaggagggagaaggattttatgaggtggtactgttgggggatgattggttttgatacaccgaggccgttggagagaattgcggcaaggagaaggggtaggatgatgtccacgaccacaaatatgtaggtggtagttgtgaagtactgtagattcgttagcagctattatcattgtggttgtagactggcagatctcacctgatggaagacattattaaagacccagagcgggacaaggccgagtagatggagtccgacaacaagcgagagtggtaaagcaaggtatcgttctgcgatagtattcctttcgacaatagtattcgtccccttctcttcggtgggtgccttctcattctttggtttagcacttggcttgctttccggatagtacccagtacgtatccagagagcaattgccatgatggtgaagtttccagcgatcaacatcgcgctgggcaagtaggttccaatgctgacaaaacggttggactgcatgagcaggtagaagaaaaagctctggtgcaggtgctctagcaagttgttcaagctgcgacaaagagactcaatcgtccggcccagggccatctcatcctcccatccctcgcccttggtctgcagtgtgatagcgtcgatatggtacggcatgaagctgctgtgtgcgccggtggcatacccgagaccctgcttggtcataccgcggaacatagtctgcagacgatgctcgtagctgtcgtcgtgaccccacatttcctgtagattggccccgatgcccatctggccgcctgcaatggctacagctgtattgaacaggtcgaggttagggagttggccattgactccgtcatatacaatatggagggtctggaaccggtgctcgaatgggtattcgatgactagtgcaccttgcaatgctccactcttcaaaggaagtggctgcaccgaagccgggtgcatatcgtggtaggcatcgatccaagcctgagtgccagttttactgtccggaggaattaagaagatgatatccttggaccataacgaccatcctagatagctgtcaataactcgactagaggcacgcaaccacgaaactcactcttgaagtatcttgccaatgtcaaggcaagagtgacaccattcaggttcagctcatcatcagccgtcttccacggcgcaaccagcacaatcgcctccgtggcatcaccgcgcggcgcatggataatggcataagtattctcgccctggtgcgtaatcccagcggaggtgtattcgtatttttgcgtggcaactttaaggcccgccgcttgcaagattgactgcaacttgtccgagagcctgtcgaagtatcagcgaatagtccagcctgtgcccggttcatttgacatacgccgctgtcacttccgcctcgtctttttggccgcctctcgcctgtccatcattcaacaatccttccaattctttcttgtaaccccggaagatgttctgctcgcttcccgtgaaatacgcatggacttggcccggcaagagcgcattctcggagatgtaggtctgtcgggaatactcgtttagagggaggagaagtagccagacgacaccgacgactatgcagatgaaggatacgagattcgggaggcgaacatagaggagattggggttattccgcaagttgcggattgcagctggcatcttgttagttggggtcctcggtgctggcgccaggaaggacaggtggtattaggcttctttgctcacatttcaatgccattgactaatgaccatcgggaaatgagttcccgtgccgcgaaggcgaagctgttaaatgagcggaataattggactgaactggagtcttacaagtcaacagtggagatagagctcccgttgttgatgcgcgaggaatttacgccgaacgataaagaccaaccgtgcaaattaattgtgagtatgcacacgctatgctattatccaatgtccccgagtctgcagcaatataaaaaactatagtggaaaatatacattaaaatgaaatgaagaatgcatcaataccgtgatcaggttcccactgggtagatcacaagtagctcatggttgtttgattgttgctgctgacggtggcagggttgctggttggaagaactccatagcgaccgtaggtcttctggtcgacagagacatagtgaggcagacgtcccaggaggttcaacttgccctcgatccaacggaggaccttctcagggggcacaaacaccttgagatatccgaggccaactaacgacgattagcagtgggaagggttaattcagataagggaactcacggagatagccaacaaggatcgcgcagagatgaccaaggaagctcacgttcgagatgaggatggatacaacgacacatgcgaacaggggtgaggtccaggtaggaatcttgtacgggccaagactgaagggcgttagtaacattggagcaagttttccaagtgaatcttacctgaagttagggtgagacttgtatgtcttgatggcttcagagccgagaagcaggaaaacccaaatgctggattgaagattagttaccgaaacattcaacctagtgatctgaagcttaccttgcgccgaccaccgaagtatttctgtgtaggataaacctctcaatcaagatgtaaagtccagcggggacagtcgagagagctgaattattcaacattagtcaaaaggccgcaaacgtcgcgtttctagagcactcacgtccaataaacaacgcaatagcagtcaaagtgccatgctcggcctcgaatcgctccaacagcggtgcaactgccacggcattaaagaaagcatggaagaagcccgtgtggatgatgggataggtgttcagtcggtacactagtaacaccatcaagtcagcatgcgcccgacatgcttttcaacatgaaatcaaacatactagtccccaggttgatctcgtctggaatcaaagcgccccattgcacaacactccaaatagtctggaattcgagcagccagaaggccagaatgatcagcagcaccagtcgagtaaacagcggtagtcggaggaggtatgtccgtatccgacccggattgaaaggcaacggaggtaaagcggcaggggtcgtcatgattgctgaatgatgctaatccgtttctatcactttcgaagaaaatagatatagtgacgaaaccactcagggcggccggaatagagtcgggctgacaagtcgggatataccgcgactttgaacgagaggggttgcgatcggagccgttggtaagaattgacaattattcaacagtcagatggtggatcgaacaattaatgactggagagaaagatcagttagattctgttttcctagttgatctgccaagccgatgccagggataactcaccaggcgcacgcgatcctgggtgaaacgaagacaagggacaagaaccccaactgaaaacgagtagccttccaaatgtcaaggaaacaatctgaatggaaaattcaaactcgaagagacgtcaagggagaccgaaccattaaagcgacttgttcgcgaatattacgccgcgcgataaagaccaaccgcgcaaggtgtccgggtagacaaaccccgtggtggtgatttgacagctcaatctaccccgtgctgtctaggtctattcagcacaaaatgtgtatatcgcctttgcatttgctatctatatttaaaattgtccaactaatttacaggtgctcgttaaaccaagcgatggcctggcagaaagcctgctccttagcccacttctgcttggggtccttcagatcgccgcgaacagcgaagccatggctaacaccgctgaacaggttgatctgccacggctgggtagtcttgataagaatatcctcggactcatggcgaagctgggtagtgaagatcgagtcgacctctgttgaaacgcgaaaattagcctttgctgcatcctttcaaactaatatcctgcaaacaacttaccagcagcagcgatagacagaggccccttaatggcgccgagctcctcgtgggtgacgaacgaagggtgcgcaatgtaaccaacgtcaatcaggccggactttatgttgcggcagacgaactaaaccaatattgtcagccaggggttatgaggtattttcggagattgaatctttagatctggactatagatacataccttagccccaaagcagtagccaacagcaccgactctcttaacgccgagagtctcccgggcgtacttaatagccgactcaacagcgggctcaacgtccgcgggcttgtgcttggggagccatgcagacaagtcgaccttgccagattccatggctttgacatcgatcgcgtcgccctggagaatatccgggacgatagtcaggtagccattgttggcgtactcgtcggcgaggagctgggcgttggtgtagattccgaagatatcggtcacgaagataatggccttctcgggggtcttgctgcccttggggtgggcgatataggcattgactagaaaatgactcggttaaaaaggacaattttgggggcgtcgggggcgtcgggggcttgagnnnnnnnnnnnnnnnnnnnnnnnnnnnnnnnnnnnnnnnnnnnnnnnnnnnnnnnnnnnnnnnnnnnnnnnnnnnnnnnnnnnnnnnnnnnnnnnnnnnnnnnnnnnnnnnnnnnnnnnnnnnnnnnnnnnngggggcttgaggggcttggggggcttcgggtggctgaaatagaggagttttataaattacctccgttgatagtcttagtttcgccggcgggagtgccttcgtgcttgaaaccagaggcacagcaggcagcgggagtgttggaagccattttgaaatatgaaggggtataaaatgtaaaaatgaagtacgatatcaaatcatggatagaggggttgcttataaatgtcccttgggtgtacaatgtcgaacttagagtctttgacccatttcgtcagatattatttcatccaatccaattggctgattgacgtattactccacttgcccctacttgcccctcatggagctctttggctcctaggggtaaacctcttggaccgccgccgttattaacattctcattgcttatgtaggtactaggtacctaaggctgaccctctggagctgaggctcaatggtcttgcactgccttcgaatatccgacttgcatatatccatggcttttgcccatctagaaatgtatgagagtaagatttcattgcctcggcagtcggcatctggcaatgacggaaataagaccctaactccttatatctaccccaacacgttacaatggtaagtttgaagagataagaaatcacattgcattcatagaaacatctgtactgcatatatctgggatactaggacatccagtcccagtcaatcccaccaaccgtattaccacattagtccattcacacattgaacgtcacaaaatatcatgtccgaggtcctccaagaaactttccttcccggggtatctttctgcaggaaatattatgtcgcatgaagaattcacaagcaaaatgactccgtatatctcatgaaacaaaaaacctcagaagtgtaaaggtggtatcaaaggaaaacaagtcgcagaatttttcactcgaagcggaagtttggctgagggcgctgtgcgcgcctcacggcccaggccttgagggcaattgtcaagatctcataagccataacgaaagcactgaagcctaggccgacagtgaaggtgaacattgcgtccacgtcgtagtactccatagtttggatcacatttcgggtctagatctttgttagtcatgctcttgggggaaactgtaaagcttaattgcacttacactcatcatgaaaatcagacctcccgagattaggcagaatgcagcgatgatctcggtcgggggacgagccgggaggtacgaggtcggtggcttgagatataacagaacgtatgtcatgccgcgcgacagcgcaaatccaaccaacatgttaccccactgcttgtgtaccatagtcgatgtcatgctgtcctggtggtgcgaccccatcatcatgccaagcaacataataactaggggtggcatggggttcaaggaaacgccctgcgacctcggtggcgtccaggcttcatccgaggtgccatgagcaggggtctggaggatggtgttgttgaccaattcgcggatccaggtagattcgaaaagcataccggcctatttcaggttagtcagattgattcttataaagagccgaaaaaaaggagatgggacgtactaaaccgccgccgaagaacagcacagaaatcgaaacgtgctcgaggtctgtagcagaccatgccttgcccgcaccggataggtgctcgagaaagacatttgtcgcgccatataggaaaatgacgaatgattctgtggcttcagctgatggaaccttagatttccagccgacaatagacgccgaaggcttcttgttccaggcccagcccagatctgcccagcaaccgatataacgtccaagtgtcaggacaccgtaccagaagaaaataccacccttgatgaagtgagcaaggccgttgaagatttcatggcccctcatgataccaccataagtcacagccccagtcgcaatacagacaaatccgaatggaagaatgacacggtcaacgatattatacacgacattcaaaacgcggagaactcggccggggatcagaccagggacagtcttggacaagaaacgaccaacaccggtgtgacgaatccagccttgcggagcggtatccttcggtagttcgtcgggcttttcaaatccgtcgtaatcggtaggcgactcgcaacacgatccagggctatgaatagaagacgagttgctatcggttccctgaccactatcgcgagaccagcgatgctcgcgcatcgcaccgttgaagcaagcatgctcgttatcattatcgtccgtcgcgacaggcagaaacgcagcgtgttcataagagggcgtattcgacttattcgactcgccgcggccagcgtaggcaaagagcaaagccaggacgacctgggtggatacagcacacgtcgcaacccagccgagcttgtggtgcgcattgttctcgtagaggtctggggtctggctgttatagataaccccaagtaggacaccgaacgcgttgaaggccaggaagaggaattgtgatagaatcgcaagccgtgagcgtgcgatgctcagcatgacagctatttgagatcagtttctgttttctttcatgctcagagctcaacaacagctacttaccgacaggaagaacaaagcaccatcctagaaccataagggcaatgtgagcaataatggtgctggagtgcttgctatacgcaaaatagctcatgggaccatcggtgttagcttgcatggcggtgggtgtaggttgcggcgcgtcggtgctcgtgttcatatgcattcccatgtccattgattcatcgtccccgtgtggaagcgcggtcgcaagcgatgcgagtagtagcgtgaaaattgccgccctggcgactcgagtggctaaaggccacatcaggaagatgatgtgatatactgcgagaaataataatgtggctgtatgtgcaaaaaatgcaagtggccgcgaagtataaggctccaaccagctgaggtcgaagctctatggaatcgtgacgtagcgagcctgtcaagccggtagctgggcccgtatttattcttgctttttactcctccaagtctagacaggactactcggagagtgacgaactagactgtccaattatctgtagttgaaaatgaagctgtagggctgaagtatgcgacaccaggagggaatgcagtatataagtccaggcgagctaggaatgaagtaccgggaaacttgctaataaagctaaatagaattttttaaaaaaaatagaaaataatagaaatgagctcgccggtgccgatttccaatgctcttgaaaaaaaaaaatatggaaaaaaaagtgcgtggagaaaaggattgacgccctcacggcatgcccaactcggtagatctcatttctgcttgtagcatgatgcatatgtaggtatcctatgctttatttaaagtctaagtgtcacgaactacgttgaactatggaaattgacgccaaagttgttgatatatcgtttatgaatcgaattttcttagctcttcctgtcattcgggtgtctcgggagcgtctaagaaatgtggattttggtgacttcatgagtttgggagcctggaactatgacctatgactacatagagccccaagatccgggatatttgcaatgggaattcttgtatggagtctggagggcgcagttctccgtctgtacagcatctgatgccttacgtgtggcacgatgtatacagaaatataggcgccttggccaatgacgtagtcgatcgttactctatttggaccgtgaccgacctgatcagctctgtatgcttccgttaggccttctatgtgtgtctaggcagacataggatgcatggaataggatgagcatagcatgtgcggagtatatatgcatgcttacaatatagcttcccacccatcatcaggttgactgactacgtgcaagtctaacgttggagatgatcaccagggatctatccccccaatcaacgatagcctacggggtacgatatgaaatccttgtcaggtgtttccatactccacccatctcggcctccctcgctttgtttcccgagccgcaattttgagctggcccgtccttgtagtgggggttatagtctgatcgtaaccgaatgtcgggctctatgctccgacatacgaaaacagagcaataagagcaaatttgagcggaagttcggcaccttgctttgttgcctaaagaggtgatattgaagtttgcgccaagtactgctactctgtactccatagtagctgcccttattcccgtgggccgtgaataaaccgaaattaagaccgaggggtggtccttgcatctctgatgcacagattttgtaaacatctcataacatagtggcatagtgggactccatgcgaaaaaaaaacaagccacgatgcatatcgtcatgtggtttcctaaccatcctggtccaagcttgcatattgtgcaactttaccataccaagcccccgctgtactccattctccatacttagtacaacactgcattctactctacttcatctactcagccaacgccacaaggatccgtcatctcccagtacagaaataagcgagtgggcgttgacaaaagtcgtgccaagaccgagccgaagcccgatcttggcgattggagaaccgtatccgtgagcatccgggtacatgagaaaaggctgggctgttacatccacgcacctgcacgtccctaggatctgcgttgaacaattgctaatctgtgaaggtgagctcttatgcccggaacgcaaactccgctttacttccgagctccgagactcggtgtaagtacagatgtctccgactgacctcgtgttgctaatcaatacagagtacggagactaaccaactaactagtgcaggtcagccgtaagctgtgatatgactcatgctttgtacatggcataaccttaagccgctaccctagacgtctgatttccaatctcgactaccgcccaacgccatggctttccacacccctcctctatggcggcagtacccggctataaccagacggtgtgacctgagatcaagccattcgacacgtccagaactcccaggaatattgcctggttgagaatacctaggcagtaataatcgggagtccggcacaaattctatccgcacccggcgctgacctagccgttccccaggggtaatggtaataatcggcgaccaatgagcagagtgtgaatacctcgagatcccgtatgatcaacacggatgtaggacttgggcacggacacgaatacgatggaatggttagggactaaaggccactcgcgctagttggaagtacaaaacgctaaaccgcctactacgtcagtagcttagtgctggggattagcgcattcgtgtgcctgtccgtagaccaatctaggtccgtggcctcgttgtgtagttaatttggctcatattaactaattctctgtagattaaaatctaatctatttggcttatgatagtagagggccgttatactattgggagtctttttttggagtcattttggggtatcttttagggtatctcagtgctatagctcgaaggatgattacatgacggtgacactttctctaaggcaactaccttcaactctcagtcatcgcgcgccttctgtagaatacctttcatccgatcatacaaccccatatcttcatttctccacctgcttccattagggaaaacagcctccctaagtgtattaacacatggaactagtggctgatagtactctgtgaagtactcattcgcggatctcacaaaatccgcttcatcggctatctcgcctttcttcaggccagctaaaatccctgtatccataaagttccacctgtcatagtttgcaacagttcttcccttgcctggcgcgtcataatggatgcatatccaaaagatcacccagaagaacgattcaaggtcatgcataaaagaacgcttctcgcccagaagagagccaattgccataaaggcccttgtgccggtctttccagttgctccagatacaccgtctcgttgttctctgatagctagatcaagatcaattaagaacgacggccacgaaggattctctttatcttcattgatcatgatattattgattgagatatctcggtgaaggatccctgcctgttgcaaggactgatgtcctgtaatgcaaccctccaatgcagcaagcagggacgaatgagtgctagccttgtaaattagtttaccatagtcgcgcaggacgacacgccgatgcactcggtttagcagtaggttgctggatgcattggtattagataccttggcagcagatgccttggtaggagatgccgaacatgatcgtttattaggtggtagaaagaggccactttgactagaagagcgcttcacactggacctgcctgtattatcaatctatcgagaatgagacgctcggtccggccgttctgctctatcttgataaatcgctggccgtctttcgaggtaatcgtagggtcaaacctacattcctcctcgctcatccataggaaaccgagaatagtggacacgaactggagcctatcctcattgatatcaaaccgttcggatgcgactcccccgagacggtcaaatgcccatatccttataaaggatccacatatagtaaagcctaggacaaatcggcgtgtatcttgggccgtaagaacttccctagtatatctccctaaatcaagccatggcttagaagctgtgtcagctgccagattgctttttagctctctaggaacgatgacctgtgaccaatgacattgggtatcctttctagcggtagtatcacttataaagccgatgtctagcttacgctctactgtagaaccctttataggtatattgggctgtgcgagtggccttcgcaggtacgtcgacgcagaattgtagtctactgagaacgttgccagtttctcactcagatctgtaaaccaactcaagacatcctcctggtttatatcttttggccaatctttctacccgtcggcaaaaatcggattgctaccttcagtgcatctttcgaatatagcatcggatgctgcttgaagaccactgatatttccaaaaaattttgagcggaaatgcgggagccctacatagagacacccaagctctgacttgaggaccctgtcaacatcttggcagtattcagaggagttagcgaagctactcgttttttggagccagggggtttgttagagggaggaggcaatcgctcgagggggcggcgtagattccgttacggccacgtccacaagattccatatctcttcatctgttgaggtctccacaagagatgctttgaaaagtggtttgattcgatcaaggtcgaaatgacccgataggataagttgaagcagaccccgttgaagagttcctcccgacttggacagctgaagaccagcagcgggaagaccctcaagggctgacacgagggcgaccgcgagagattgcataactgtatttaagttagccaaaataagattttgcgatgcagtgccgcaccctcctgtgtaagctgatcgacatcgtctccacagattgacttgaatctgttgcgaaagccatttaggccatccccaataaggttttcaataatcacctgtgatcttttttgatcagacatggcatggtgctctttctgccaccaggttgactttgtggtgagagtaagagcggaataccacgtgatttagagagtggaacctaccccgatatagagcggttagacctggcacgtaacatatggcacaccatttaaagatattcacggagtagtaagtatctaaaacctatatattttaacaggggtgataaggacgctaaaaatttagtgtatagctgatatatctagaaaatgacacctaaatgacgtatattgtctaaatcaccgacgtattgttctgctattctccgaagtagctgaagattgagtgatctaaatttatactcggtgttatggctagaaggataacaattagctataaaaaagtgccaggaatatttgacggaatatctccaggagcgaagtataagtcatgtagaatgtctgcactatcacaatgaagtcattgcaaatactaactattccagttagtgtcctattgcataaatgattacctgccttgctagtgccgccgcatagagccttaaccgcatggggcgtcatctagatagatcgtctatctagccgcggcaccaaaacgggaccagtatatccgatctgtcgacacctacagccgctacgaagaattcgcgggctcaatgatcaatggtgcacctcgagaggctcacccagccaaacatcaaaagctacaccaaatccagggacaagaatagccgtgcgagagcacgcccaccggcatccagaccacgagcaagttgtacagcaagctggagcagagatgattcccagagaaaaattccgtcattgaaattgttaagaaaaaaccaggatgagggaaataacataaatcctcgtttttcaagacactccatgcaacaaccccaaatcctcccctcggagccaagatctggtttgattcgcaaccccgagacaccggacacacaagcccgatgtctattcctccattcacaaaaacatcaaagacgccatttttgagcccgtctgaaacattgctccacttgacgctaccgtagtcgagccgggtacgtagatggatttcgtggatgcgaacggttcgagaggggggagttggttttttttgctcgcttagcggtactgtaggttgagaagcttgtggttagtgttgtgcttttgcagtgtgcatgtgtggtggcagtgggggccgggaagattgtcgattatcgattggaatttcacgtcggagaatgtgattgtgtggtattcgaatgggatcggacgggattgtcgagagaggaattaaaacgaaccttggtgaaaccaatatcggtggacttctcacggaagcactgacggcagatgttcatctaaaacgatccgtattagccacacaagtccatgtcatgtcacatcttgcgatatgcaatatgctcgagggattgatatctccttacgccgtacttgcggatcagaccggcgcggtgggagcagacacggctgaaggcgcacaattattagcaagcccgttcgttttgtatcgatttttgattccatccaggattcctccaagtttcattctcggtgtcgactggatcgttcatcggggaattatagcagggtaaacacaccattcgcgggagcccttgccgtacctatcgagcggagagaaatcccatgttagcctcgtcgctctttttcgagatagtgcctagtgtgtgcgtggtgcggtttcgacttacttgcggggccggctgtaccaaacgctctcgtgagtcatcttgaggttttaaaggtgggacctgggagttgacggggttgttgacgggacgagggtcgctggcgttgggcgttaagaacagagacaggagttagggttggaatttgcgttgtgtgctgccccaatggggaatagggcacgggccaactcgcttgagttgcgctagctgtttttggtgtatcatgtgaccaatgggcgatcaccacatcttagcgcctcaggctgccagatcttatacttcacttttcaacattaatcttagctgacttttcttcaaagtgctattgatagatactttgactattattcgaaacttttcgagatacttgaattatgaagacaacgtgggctgctcttgtaaattcaatatactaggaattcataaggctatgtgcataaagccaccagtttgtactacagcgaaactgtattttcttttgaatctacgtacttcagaatgctggcatattaatagccgtaatatacagcaaaagtgacttccctgctcttgaaacagagcccttctgttgctttctctgtctgaagacctgtgggcatcttccccacaatcatggaacagttggcctagactagatatggtcaagaatgacctccacatgtcaattaggttatacgttttggaataaccaggataagtaggataatctcggggaagcaaatcagtgggtctatattgccatttagaagactgcagaaaaagtgtggtgattaacagaaagagatagcacataagcggctgcatattagcatagagagaagaatgtttgttcttgaggatgtgtgtaacctcgtgttgaggcacgtgtcctgtttgctagctatttaattagcctcagttgattccttcttctccttcttcttcttcttcttcttgccaacctggaagcttgtatattcctgaggtgaagtctcggcacttctacatccatatttcattctaatatattatatatataggttgatcttctttcctatcatccatcctcccattccaccccagctggtctcgatgaaaacttccaaccgacctcaacggcatgcaagttagccttgctgtttaaacgccgaagtcactcagaagcttggtgatctggttgactggttgactgggctattctcgagtgcattcacttcatgaaggaatcaaaagctgccgggtcttcccttcgacgtggccaggttatctagcctctggccatgttccgattatatattcccaggtggaaatgggaccctgccacttgtgcccatggccccatactgccctcccagacttgatctagcacttagctacatcggaaccatattctcctcatcaatcatgagtctgtcgatcaacccaccccttagctaccaggggtgaacgcgaaccttccgaaatgcaccaagcgagccaaagaaaagcaattcaatgtctatagaggccttttggcgatcatcgatttatatcggtccatggctaggatccctcatgccgtcctccaaggtccttccttcttgttctttcaaggtcctactcgtgtccccaaggtcctttcttcttgtcctttcaaggtcctgcttgtgccttcaaggtcctctgagtccgataaacgcgctcaactcatcacccagcacgataccacgctattcgacggcaggccttgttattcagccaaaactcaacacactttactgctcattggaaaccgcaagtccgtgcttcagagtccggaatccaagtgcttcgaaatcacgagccacaaattgaactcgacgatttcactctcaatttcaggggtcaaagatctcttacattgcgaatcattattttcagtgtgctgggatataatcagatcggagggcatatgttgatcagttcaggtcaagaaactcgaagactggtcttcatgcaaatcgcaacaaacccgagatgctgaaggtccatcacttttccggtccgcaaaacgacatggacatggaccatggaccctggtggtgtctatattttgaccatagctaagttgaggagatgttgatacccttcatccatacgatcatttaagtcaggttcgtggccagcagtatttctatcgcggccacgtggctcacttctggacgtcctcaaatatacgatcggcctcccttagagctctagagctcgacgtggccgttttacggctaccagataccgcagacgtttcccacctacgctgtcagctccgtcgggatttcactgggttacattataggacatcagtccttgcaacaggcaggggttcttcaccgagatgtctcaatcaatcatatcatgatcaatgaggatgaagagaatccatcgtgccctcgttcttaattggtcttgttttggtcatcagagagcaacgagatggtgtctcgggagtaactggaaagactgacacgagggccttcatggctgttggctcgcttctgggcgagaagcattcttttcattcttccgggtgttcgccacaatgcgattcagcggtggttggaatttctgagattggaccactccggctatggcacgttattgaccgtgaccgaatctctcagctgcccgtcgaccaggatatatatgtcgaatcagaccccctctgatatcatgcctgtgaattccggaaattgaagtccaagtctacagtaatacagcgtgatactagtatatgcgaaggaatcaagtggctatcgacgtatgagactgattaattgtgttgtaagcctaactgtgcacaaaggttctacttcttaaccttctcagcccgaagataacgggcgctgtaaaacaggagataggcgtcctggcggaggacttccgccacacctgcgatggtgactttattgtcatccatcaatacccactataaaggtaacccattagcacggacacagacgggacgagggtacagtggaacaaaccttgtcgtggtcaatacgagtgtatgcataataatgtccagagtccattgtcccttggtggacgatgaccgtagacaagtcgtagatgtaattcgacatgtcaacaggaaggttgtcctttttgaccgtgtatggcagcatgttcacagacaaagggaagtcgatatgaccattcattttttcggatgaattagaggagtgttcataacgctgtgggaaagtcagcataagatcttattccaagggagccagaactcaaacataccttcagctgcatgcaaagcataacggggagtttgcggattagcaggcgcttcgaagcccgctggggggtgttaccacacttttcgcagtggtaagcagcatcggcgtggaggtcttcggcggcagtgaagctatctaggcagccgaggagggttccagtagtggaagaagtagaccgaccgagcttgcgcttcttgtgttgaagctggacatcaagactcagatcggccatagggtcgtgggtgttagtggtttgaccgcatttgtggcacatgacgctgctgcgcagttcgccatagaacatctggtggaaaaagcactcgcatggcttatcgtagctatccacatgtccgggggtagatgagtgcagttcattgacaaggaattggaagtattcgtgggcgtcttgctggcgatatccgcgcatttcctgtaactagttagcaagttctgttgctcaactcggacctcgacgtaccttggatttctgccagccatgatgaagaagcacggctgcagagactgcatcgtttctctcggcgctgttaaactccatgaagacttcagctgttgcacaggcgagacagtccttgatcatgcatgtgtggacatcatggccacctcctaggaaataggcagtgagggtagggtcgtgcagcagggcctgcaagatagaagcttgatagcacgtttgacccatgttccagacaccacgagcgccgcggatggcgcatgggttcttgtaagcattgctcttgacgtagacctcggtggctgagtcttcggcccaaatggaccgcccatctaccatatattagtagatgtccgcgaataaaatattcttgaatcgcctaaatctcaccgagggtttcaaatttggcagaagggccacggagtctgtcgagggtgtggtcatagatgaaatcgacacacttctcacagaagacaaagcggttgcgagactcgatatctgccatgtataagtatgaaccaagttgaacagtaagaaaccattggcttacaaaatgcatgcccagtcgctgcagtatgctctgctcgtttggaactcaggcatacttctgtgcaactcaaacagtgatacttcggcttgagggaggccacagttcggaggccagtagttggaacagcaaccgtttctgtctttgaaaacggagctagcgatttgtacttcttgcagaactcctctctgaactggccagcagtcttctcgtccttggagagaatagctgcaagatgtactagcgggaggtcagatgggcacaaatgagtcacgacaattgccattcttaccacaaccatacgcagcttcagatagaagttggaccgaatcgagagtcgccatagtgagcgacatgagtatggttagacgggagagagaatgaaagagataaggtggaaaggagaaggttaggattgatcagaacacgacacaaagatatgcagtagaaacacgttaatagaagttccagacttctaccgacgtggagacaagaagaggaggttgaaagagaattcaagggagagaaaggctggttatagagagcaggtacagcctcaaggactcctgctgaatagggccagcattgcactgtataaacagacatcaacaatgtgatcaaacagagcgtaccagaacaatagaactcacgatagcaagtgaatagggacaatagtagacgaacagagggaagctatacagtccacaaagggttgcgtatgacctggttcgacgtcactaccaagttcgggataatacgaccctattcaacagcaatgaatgtaaatataaaagtctattatgcactgaatggggtcaagtttccctgaggatctcaaaagtagtggggaggttggtttgccatcgggcggtggtttttcgcctccgattgaccgataccgccggataagatcagatggcagaaggcagaagctgatcttggtctttttgtgtagggaagtatttagtgatttagtattcaagtacagagtatatagactgggttttaatgttgtacaacctccgggtgacatgatagttccattcaatggtcatttctaggtaatcataatgaatggcagatgcgccaacccactgcagtggaagctatagctaaaggtccagcccttggacgctaatagtcaaacatgcagcatgaataataaattgttcataatcaggtcattgcaggcattcaatatccgttaccgagtcccagtccctctgccccgaggcagtgcgctagcacgcccaccgcgcgcagtgcctcgtgtagtataccggctgcttgctgtaccacgagcagtgccacgcgacgttccccttaagcccgcagcatacttggacgtcggtctagaggaggaggtggtgctcgggggattctcgacaaaagttgtgtccgtagtcctgtagcgtgagaatcattagctcaagtgtcctcttgtagattggtcgcatcgccctctcgactcacataaaggtcatctcgccgtcatcaagcgctcgtgttcgttctgattccatctctggatggcctgttagcaaacccagtccagcgcacctaggtagttcccacagagagccctcgcaataccttttttctcttcttcatcctggttggcttttttgaacgagtccggaatcggagcctgtgtcgaatcagcaaccctctcgcgctcttaccactgccacaactgtcggcgacgggtctgcgaccatacctctgggaaatccacacagaatgcattcatattcaatccatagaggaaactggcaaaactctcactgaagcgcgtcaggctctcgtgcattagctgcaagtgcatgaagttggcctcgagatctgccatcgaatcggccagctcggcgaactgcggctccaaggcattgatggcaggttgtgtgtatcctgaatttccaatgctatttccatatccgtgtgcttctcgtagtgaagatcgcgagcttgggcgtagaggggttgtgggcctggatgagggtctcgggcgcgaggatgatcgaggtgcgtccatgtcttttgtatttgataatctgataggagtgctggcgagagatagtaggccaacaataaataactgggggttgttattgttaagagtgggttgttgtcagagcgatgtcggtgggttgtgtttgggattgttgatctccccggaaggaaatgtctcgcacgcgacaacttttatacttgcaatttggagatgaggactgtatttgtacaatgtagatgtattacatggacttgaacataagaatccatgcctctaattgattcctcgttctaccctacattacctataaggaaatgatcttccccgcatcgtcatattgttgattccgctcggcgctcttacaatttcttccctcccatctcccagtgctaagacctagtgctcactcataccaccataacacctcgatcatactgcttatgcgtggcacaatcctacgtcgtctctatccttcggccaagttccctgtcgcccggtattcattcgcgcgaccattttctacgcacccagaaccaagaaaggcttcatctttctggacccttacatttactctcgctgttgtcggaggaggcgcttggctccaggacagatacttcaatcccaaagacacaatcactccgcagccccagctgtctcaagaacccttcctcggagtaatcgatacgctcgcgacgatgcccgcccaactcgcccccggaacagttgggaacctcactccggagcaggaagtgaagctgcaagaattctgggtcctggcactcaaagtcttcggcctcacattcgaagaactcgaagcccccgtgtctgccgcccccagtgaagccccaacacccgccccagtccaggataagaagaagtccaagggccggtggggaatttggagccgcggcgacgacgatgagacgaaaagcgctcccagcagcggcgccggtaccagcatagcttcaatcagtctcgccgacggcgacgacaagtacggccagtccaaggagttcaagcaagcgctggaggacatgaagcccgaggagatccggacagcgttttggaacatggtgaagggcgacaacccggattcgctgctacttcggttcctgcgggcacgcaagtgggacatcaagaaggcgcttgttatgttgatttctacgatgcgctggcgactgctggaaatgcatgtcgacgacgatatcatgttcaacggcgaggcattggctttgaagatgtcgcagggctccgatcccattgagaagaagaagggtgaggacttcctgacgcagatacgtctcggtaagagtttcctgcacggtgttgaccggactggtcggccgatctgtgttgtccgcgtgcgcttgcatcgggctggtgatcaggagaatgaaggattggagcgctttactgtttatactatcgagactgcgcgtttgttgcttgcgccgccgatcgagactgcggtaagtattccggtgtgcggattttctctcgggagctgactcttcagactattatctttgatatgacggactttggtatggccaacatggtaagctttcgtctctacgtgcttgacactatactgatatctccaggactacgccccggtcaagttcatgatcaagtgcttcgaagccaactaccccgagtctctcggagcagtgctcatccacaaggccccttggatcttctcaagttcgtatcctagcaccatatataaaacccctttctaaccaaaccaggcatctggggcgttatcaagggctggctcgacccagtcgtcgcagcgaagattcacttcacgaagaaccgtcaggatctcgaacaatacatccacccaagccagatcttgaaagagctcgaaggcgacgaagactgggaatataaatacgtcgaggtgccggagaacgagaatcccaagatggccgacaaggaaacgcgagataccctggtggccgagcgccaaaagctcgccaaggagatccaggatgtcaccgttgagtggatcagcaccagcttcaaaaagaagaccgacgctgcctctgctgccaaggagaagcggaatagcttgatcgagcagctgcgtgcgcaatactgggttcttgacccgtatgtccgggctcgctcgctctatgacagactcaatatcgtccagggcggtgggaagattaacttctatcctggcttggagaagggagcagagacatcggcataagctacgcagtacatgagtcgcggtacatgagtcgcagtacatgagttagatagtgtcatgcttacctgctaactatagagttttgatttgcatgtgtgtagtatacacagacttggcttttgttaactagaggatatatgaacatttggtatacattcaacagcagagccctgggtaaatccaaccgggtcctacttcagaggccctacaactcttccttcagaagaacctatgtagttcacagcgatctaaatcagaggcgatccaaatagagataactcagtttcattgttcttgaattcattgtcaccaaaaccaaagccgtttacatcttcgactggatctcctcgtgaagagccttgagcttggccatatccgtctcctgtgtaggccaaccaatggacataccctccttctcgttaggcttgggaatctattatattgtcagtgtatattcaaaggcgatttctagcgtaggaccaaaaattcgaaagatagtagagcataccatgtggaagtggacctatgagagacgactggttagcacggcacaattattagaggaatccccaactgaaactcacatggtcaacgacctggtgcgcaatgcggccattgttctgcaggatattgaaatcctcggcgccgctggccttggcaatcttcttcgcgacgggctgtgggcgtacatcttggttagctatccctgttctccaatccaattccgggtctctagggaccttgcggggttgcccccaaggtccccgaagatatgtaatcgaatccgatcggaccgaagacatagactctcctcttcaccctcttcgttgtcctgggttgttctctcgacttaccaagatctcgagtaggtcctcgtcagggatatcggtcaactttgcgccgtggaacttgggaatgacaagctgcacatgctgtcagtttggacttttcttcttctcgaattatcgtgcttgaatcgctggagctatcatggcagttttggcaacttcgctccccgccataatgaacacgccggatgcggggaagaggggtaggaagtaatacgcaccgcatggccacggctcagcggctggatatcgaggaaagcgaagactttctcgctctcaaagagcttaaatgaagggatatcacctgtatagccccaaggaagcaggtcagtcaacgcatattctgctatgacgtgtcgactggacattgcgatagagtacggagtagctatagtgtgaaatggacatacccttgatgatcttgcagaatatacaggcagcggacgacattttgtaaagctttaaaattggaaggtcttgaatgatctcgaagtgaagctatgttgtaagcgttcaatttagaaaaaaaaaaaaagaatatgcggggttgcggaatgaatcgaccgacgaggatcgaactccgaccgttcccgtgtccagaccacagccaaacttagcaatgagggtattataaactaagtccacgaagcagattcgaggagtgggacaagttagtgcagaacccatttcttgccttttaccagagatggccgtgatttgcccacaaaactcctcttataaatctttggaaacacaatgacacagctgtcattttttttcttttgcttttgcttttgcttttgctttttaattatttccagcatacgtagaaaactttgatttgtatgtaactgggaaatactgctgtgcatactccgtaacgtcggtccgtgtagatagtgtatagggttgtatccttaagcagctattgacgacatgtatgttgttgctatgcagttatctatgttgtatagcttccattcctcctagttgcaatgctgtaaactgttatttctatgggttcgacttgatatctctagtttgtcctatatactccgtacaatgaatggcttctagagctaccttggcaggatatacatccttgaacagccctagttacttatacgtactagtgaataatgtccgaacatggatttaacatgaatagtagatagctaacaagagccaacccactagctataatttcattgtatatagaaaagtatccatggatacaacatcgattcttatagatatgaataaagcatggggaacatccaatcacagtccaggtgttgtcagaccaaaacggggattttctcctatagaggtcgtagatatactaactcatagctttcagtaaagataccaacttcaaatcaaatgaacaaccagaagctatcataccagccaagcccaagaataaaaaagaaagacgacaaggtgatttgttaaagtggtggtccgtactcccgaatcaggactagcgcaatagtcccgtgcggttcttcccacttgacgctgcgaaagaccgcacatcaccacgccctttggcaacactccgctccaattcgctggtctcgagagatatacccagccagagaccatgcagaagtctcgcactatcaacactgccctgggcgcccggccttttgtgccagttccgcgggtgcagccccagttccagcgcaaccttcaggatgtccgcatcacccggactggcaagcccgttataaaggtccaaggtggccggtaagcgatcaatgaagctgtggttaactctaatgtcctgcttactgacgcgctcttctataggtcttccattggaggtagctaagccgttccaattcgatgctacgctcgatcccgatgtgctcacgcaattctaggtcacaccgcgacggtctttggtgctactggtttcctcggtcgctatattgtcaacaagcttggtaggttgaggtctgatgcactgcaattggaccgtagactaatagtccgcagctcgccagggatgtaccgttgtcattccctaccgcgaggagatggcaaagcgacacttgaaggtcactggtgatcttggcagagttgtgttcatggtatggagccgtattacgcatatttgttgaatgtggagtgtctgaccctgtataggaatacgacctgcgcaacacacagtccattgaggagagtgttcgtcactccgatgttgtctacaaccttgtcggtcgccaatatcccaccaagtgagttatgtgtggtatacatgaatgaatactttctgacgacccaggaacttctcatacgaggatgtccacgtcgatggtgtcgagcgtattgccgatgctgttgccaagtacgatgtcgaccgtttcatccacgtttcctcctacaacgctcgccgtgactcgccttccgagttctttgccaccaaggtcagcatatccactggaatacaagagcgagagtgctgataatgtatagggatggggtgaggagattgtccgcaagatctaccccgagaccacaatcgtgcgacctgcaccaatgttcggtttcgaggacaacctgctccacagattggccaagatgggcaatgtcttgaccgccaaccacatgaacgagcgctactggcctgtccacgtaagttattctcccggctggacaagctattgaactaaccctctaggccattgatgtcggttccgctttggaggctatgctgcatgatgacagcaccgccggccaaaccttcgagttgtacggccccaagaactactccaccgccgaaatcgcccagttggtcgaccgtgaaatcatcaagaagcgccgtcacatcaacgtccccaaggctctcctcaagcccttcgcgcactacgccaacaagttcctgtggtggcacaccctgtccgccgacgaggtggagcgcgagttcattgaccaggtgattgacccgaccgccaagaccttcaaggacctcggtatgaacgagaccgccgatctggccaacttgaccttccactacctgcaggcctaccgtagtgcctcttactacgatctgcctccttctacggagcgtgagcgccgggaggacaagcggtacgtgcatgtgctggacgaccagtagtttgtgtttttaatgtgtaaataagccttcctagacccaagttgatttcctttgttggatgagtgcatagtacaagtagactcgtagagaagcttaagtagagatgatcactcgccaatatcaaaaacccaattccccagaactccccgcacccgcacccgataacatcatattctacctccaaaccttacctacgtcttaccttcttcaccttcagcctcatactcatactcactccaaaccaaacccacaatgcctccaacacccatcctcctcctaaaaacaaaatcctccccccaagatggctacgaagagttcttctccgcacaaaactacaccccaaccttcatcccagtcctagaacaccgcttccacaaggacaacctcagccaagtccgcgaccgattcaccagcggcgaattccacaccgaagccccaacccctcgaaaatacggcggtctaatcttcaccagccagcgcgcagtagagggtttcgcgcagatgatcgaagacgaacaagacggtacataccacacacaacccaatccaaccagactccaacacactaacaccaacaaatccagtccaattcaacaccccatcttccccactaaccctctacaccgtcggcccagccacagcgcgcaccctcacaaccctccgcgacaaacacctcccacacgccagcatccacggcgccgaaaccggaacgggcgagaacctcgcgcgcttcatcctcgagcactacgacgccctgcacccgacgcacaagccctcgctcctattcctggtcggcgaagtgcgcagggatatcatcccgaagacgctgatggatgaggcattgccggtgcagaagcgcgttggggttgaggaggttgttgtgtatgagacgggcgtgatggggtcttttgagggggatttcgcggatgtggtgcgcaggtcggcggatggggcggtttgggtggttgttttttcgccgacggggtgtgaggctatgcttagggttcttgggttggggccttttgctgggaatggaacggggaatgggaatggacaggtgtttgttgctactattgggccgacgacgcgggatcatctgcgtgaggagtttgggtttgaggcgcatgtttgtgcgccgaggcctagtcctgagggggtgcttgaggggattgagaagtttatgagtgggatttgagggatggggatctgtataactatgtattctgtgtataactagatgtaaaatggaactataagtatataaacttgggaataggactagcagagatacagcaggtagcgttacggagtcagctattttacttaaatactcataatcacatttcgagttgcctgctatctctaacatgtatcaaatcacgctgtcaagtcaaattgcgtgcagaatagaatccagtatcctccctcaacttaatatcatttggaaacagtcaagtcgatttatcgcatgatttcctcatagatcaagactgggagaggttagtaaatatggaagagaagaggaaccagagacaaataacttacgcttcaactgctccttactcagagcatccttgttcttgtcgaaatcgaagaatccatcaggaatgggcggtgcggtgggctcgtcttcgggatcatggtatggctcaagataggggtgcttcagggcttcctcaacggtgatacgcttagccgggttgaaagcgagcagcttctcgagcagatccagagccgtgtcgttgctcttggggaagagtgcgcggaagggaatcttcttcttaaaggggagggagcggatgtattcgcgggcgcggcgggatttaatgccgtagtaatcttccattgtgggtgtgccgaggacatccaggatgagggtcaactggtggtgatctaagtgtatgttagttctgttactcttgaagggaaagtggaatcgtacaatccttgccagggaagagaggctttccgcttagcatctcagccaatatgcagccgacactccacacgtcaatagccttggtgtattctttgaatgtcaacatgatctccggtgcgcggtaccaacgtgtggccacatattcagtcatgaatccagagttatcatcagtggaagcggccgagcgagctagaccgaagtcgcagactttcaggtcgcagttggcattgagcagaagatttgagggcttcaagtctcggtggaggacgttggctgagtgcattgccttaagcgcacgcagggtctggtagataaagtactggcagtgatcatctgagagatcttgtgtgcggataacccgatgcatgtctgtttccatcagctcctgcatgctgttagtgaaccatatttcatgcatgcacatctcagacagcttcaacgtacttgaatgagataaacttcattgaatccctcgtagttgcggggccgttgaatatctaggatggagataatgttctcgtggttaaagtagcgcaacaacttcatctcgcgcagtgtacgcaagcagaacatagaatgatcgaatggcgtgatcttcttgatggcgaccttctggccggagggcttatgaatggcagagctgtacgaggttagaagagcattgagaagaaatcacgtctacttaccagacgacaccgtaggcgccttcgccgataacatcttggatttcatattgatcggagacattgaaggagatcttccgggatcctcccacgggagggttctgctgacccatggcgagaatggtttctctaatagattcagccttggggtgattgtcagctttgaacatccttgggatccagtggaaaaaaggccgaacacagtccatggttaatgaatgagagccggggattgaaaacagtagatggggatggcgcacaagttggcgattcacagtccagggaatgaaaacaatagcagaggtcaatcgctcaaaggcaagcaactcgaccgcagtaacgcgagggaacaaacgcaacaaacgcaacgacaaagcagggaaaccgggatatgaagcttactttcgtttgcgctgtaatcgaattggtttgaaaaaccgtccaagctactgcctggattggatttcaagggtcggcgagactcaggggataaaggcgaggtgtagaagagaggaactcggtcgtacgaagctccgagcggggaagatgtgacaggtacggagtacagcgtctagacccacgagaccgggggggggggatacgaagagcacaggtgtaggtgtcaggtcggatcaggtatcaagctcagagtctaagaacgtggcatgtcagtgggattgacggtgatgatgctggagcgcatggagatgagccaagccgctcggaagcggggtcattctctcatgcgggatcacaacgggtctggactgcgactcaccttgggtcgccttttctctacgaaggcaaagggagatagagaagaaaggagagaaggatgaggataggtgaacctggagaaacagcgggccgtaggggaagtggtggggcagagagctttaaggcggctccggtagatgaaacaaagtggttcaggatcagaacacgggaattggggtcaattaagaaggaaaccgtgagagggagcccgggtgagcgacgatcccagagcgagcggagtgaagacgaggaggtcgaggaagagaagaagaagttggtctgtcgctgttttccccctggcgctttcgctgggttgatggccgtggaaccttggatcaccatcaaagtgtctccaccagtacctgggggtacttaatttatctacaagggacccatacattgacaagtatcccccatgtacatcccaccacagcgatcctcagatctccgccacggcgccaaagtctctcgcctgtcacgctcgttggccgctggacggcgctactgcaccggacgaaacttgtcacaatcaccttttcccgctccaccaacataggaggtgctggtttcatcctgattggagaatccaccactcctagtttcactagtcacaggggggtcctgttaattgggtctgagacactgaatctcaggtaaaacaagtatacggagtaggtcatgcgcatatggtgaggtcaatggactccgattgtaggccgtgtgattctcctcatcaggcctttcatgaggttacttatttgtttcagggcttacgcttgagcatggcgctaaaatatacactcaaaatagaaatgtggatgtggattctactaatggtctgatatatatagaccatcactatgttcgggtcaaagcttacttctagaaataaacttgcaagttggattgataacggtagcagcggcctaggtttaattggagtgaggagaacatgatagcttgcaacagaagacaatataaatatgggcctaatcatggttgatgctccatcagactgtagttactctacatacgatgggagatccaccatcgcctgctccagcgtctcaaaatcagcgaacgaaacattgtatcggagatgtcgcttgagcagttcatgggcgatgaaacgctccggcatgttcccctgtgcatccaggaaagagacccggggattggtattgctgattatctgcagctcgttcgcaagacgatggtgatttggacactgctctgcacctactaggaagatcgtgacatacacccaggacagaccaagaagatcgagctggaattcgttcatgtctggtgcttcaccgtcgaggacgataagcagtcgcagtatgggtgtttgtggaccggcttgccatccgtacataggatggtaaattgctgtccgagagtgcttttggaaatggagttccttggctctttgccagcctagcatcagtcgagtctcccctccaaatctaatgtttggccatatttgttcgaaattctggtggttgatgtggcccatgtagcgggcctgatccgcgaatgtgacgagctggtagcctcggctatcatggtcgtgattgatcattgcttgggaaaagcgacgtacgatggcctgggcaatatctatttattgaacttagtatctgatatagactggtcggagggtgatatcacctttgctcttgggctgcttagaggcggaataacctgtaatgagatgctcattatgattcgggcgaagcggtgcagagttcatagattcagagacctctaacaggatcatagtctcgtctagaggagctgccggctcccgtaagggtctgaaaggagtcataacctgcttcgagtaagtctcggagatggattgagccttgcagatatcatcgcgagagaagtattccgcaggtgttccaattgcggattccatcctatatcgagccatgttcatcgcagagatgacatcaggcttcatcttgtttccaacaatgccctctgtgttattcatgacccagtatagacgttcctcggcgagatctttgtatcctctccaaccgggagtgactcctctccacccaccaactgcgtcaatgctcaatctgagcgggttggacgtggatttcgcccaatactctgggataggctcgaaatatcctgcccggaggaggtggagatactgaattgggcatcgggctcgaagatcggcgatcttttgactcgtcccggctgtttcttggtacgctatcacgagctgtcgccattcttgatttggccacctgccttgctcctcctctaggatggccatgcgtagctctctggtgtgactagctgctttctctgccttctcctctggcatcttcttggataacatcttcttcaaactgccaaatgccgatggcttggagctctctatggggggattttctgctggttgctgggtattaggagaagctgtggtgtcagcctcattcggcacagaggtctctgggtcttcgctatcccatatggtaaatgctggctctttggaatcaatgacagcctgtgccgcagcattgagggttgcattcaactgtaccatcctttgaagatgctggctgtagccggacggagtaggtttcgccttgttgtaagtcccgggagttgtaaccggaaaaggcgagggcacacggctatatgggtttttcatgatgagagccgacgaatgactatcatgataggctgattcacctggtcgagaaagaaagtgagaccacaacgcaacttatatcgtcaaattggcaaagctgacctggatagatgactgctttggaccatatttcctgaatatgaaggcgggcagcctttctgtctttgtatttgtggacatcgcaattacaattataaaactgtgtggtatgctctggttcaatatccttattgaaaatgcgacaggcctgctggatgccgtgtagggcggccttcatatcttgctatcagagcagacaaatgttagcactttatcaagacgaaagtattctatatcgtacttcatctttagagcggacctcggcagcttcaataaatttattggtgtgatggtgtgcaagctctcttatcactgaacgtgcatacggtggggggcagttccgtatatcaacctcggcatctatagtaggcaaacttggagttatagcttgattttgggcctcataataccgactaatagcatcatcaatggtttccgcgccctggaatagatgtgttagtgtaggaaaaaaggaaagtgattgaatgtcttacctccaagaatctgagggccgtcccttcattagcctctggagcgatggaaatgaacttcgctatgtcatctctcgaaggtaacatggtgagaagtactgaaagaggtaaactaggggtgaaatgtcaaatggggggtcgccagataggaaagtgcagggatataatctcgttactaccccggtgcgttagtgcactagactactacccaagcatcactaaacctgaattgggggcgtgaatgggaccgagcactctcttttcaacaattagaccatttgattcgattggactggatcaatttgctaaaaaccatctgaggtgccatccctcccatggatattctcatgattgcttcgcttcgctccgcaataaaatagtggaaaaatgataccgttaattcttcatagatgcgatcagcgtctatcgcctgtcaactataactcagcgatctactagtactagataatccaaacatgcccgccgtgatagaaagccaaacgcaatcttcccaacgtaatggtacaggcgggagagctcgcgaaaacacgaatttcatggtcaaccgagaccggccggtcagctccacattactgcacgacctgcgagcaaatcgtcagtgctgaccgatactatggccagagcagagggctcaaaccttctcttgcaaggaacccatccactgatccaagctgacgctttggtcggcacggtcctccaccagcatcgtctgagcccagagacgcagaccgggttcaccatcttcgcgaacgacgtacaggtgaggcacgataatgctgcccacacccttggcccggtggtcccgactcttctcaaccacggcccgcacacgctggttgaactcgttctcgacgtcggggagggtttgcttgcccacccgcaactgcgacttgtcagggacgccaaagacatcctcgatgagctgcgaaacagcatcgcggccaacccagaggaactgggtctggccatcgtcgatgaggtacaggccgtaaggcacgaggcgagccgaagacaagttgacagcagggggcaagaggatttcgccggtctgtggatcaggcacacccgcattgtcgggcatgtcatggagtgagtacattctcgggtagatatattggatgaggagcggcaggggtagggtcgagagaaggcagagagctgcggaccgcatgtccgtgggaatctgggcggatttgcgaagaccaagctaaatactcgattagtatagaacagctatcacaaccaaagataaaactcacgttcttgatcattgcaaggaataggacaggcaaggctcgcaagttggcagggaactggaggccaccgccgctaacgctaccacctgcgagctccttgcggtaggtctgcagaagctctacgatcttagcctgaagagcctcacgagcgggctcgagaccgctgctcaatgtgcgctcgacagccttgtggctgaagaatgtggcaatggcctgctggtcagccgaggcgaagacgtctgccaggttctgggtcgttggaagcgccagggtcaagacacggatacgacgttcaccgttgcaggtagtgtggaggacagccgcctgcatgcagacgaccggctttgtaactgtctcatcaatggccacctcgaccacgtaggcctggtcacgagggaaggccgggaaagcacagagatcggaactacggttaaagaagttgccgtaaaaggtgctcatacgcagaccggttgttgcgcgcacgcggaggacggcctccagaccaatctccgaagagaggtagtcagagaactcacgggcgaacttcatggcatcttcacttcgtgcagcgttccagccagggtagaagtaggtttgaccaccagtgtagcggggcaagcagctcaacgaggccacatcttggtattgcgatgagaagaggaacatatccacggagacttgtgattttgaacattcaactgcaaagctcttgtagaaagagtttgcggtttgaagcagactcgattccttgctggtgcccagcaccttcttgtcttctctcatagtgagcgctccgtgaccagtgttaggcaaagatgagctcagaacagtcatctttccaccaacgggggagatcaacatgtaaccagctcgcaatgccgcacccatggcgcagctgttgttttgagtgttctggaacatttcttgcagcttgcggaggaatatctcaatgttctcccggcattcgctcagcgtcaccaggagatcaccagggatgggaaggaaaggctcgtccagatcactgacaaccaacatccggggctccgaagactcggaatcgtctcgaggaatgctgaagtagtgcaagcttgagtccactgcaataaaaccgaggcgagtacgccgatctgcgttcgggatacgatcgaggctctcttggatggtgcgagcggtagtggccaaaagaccgttggtcaccgatgcataacttacatcgatcaagaagaggtaaaccagcggttgaggtggtcggaccatgtattcctgcggcgcaacgaattcgaccatgctgtggttgagatcggcacggagctcacggtcggcgggcttttgcagtgtagcatcccaatcgaaggcttgtggcacgtcgttcgtcaggttgcacatgttacaacgccagcggtggccatggtcgaggaaggtaacgaaggggttgatataagagcgacaacgtcggcatcgtgagatgacttggtctggaatcacagggatagggtcctcggcgtcgtgaagagaagcatacggttgaatgacaagggcgaagggcaactttgatttcttcaggagtgagttggttgtggggacagcgttgagcgtagatcgcatatatttcgtagggcaattggcttccgacgggtaaacactggtctgtcgattgtaagcatatcaaccatatgcgcaacatggcatctatacgtactcccgggggtaaaataattggaggagggggatagtccagctcagcgacgttgaaaggttgggatcgaagatccgtggggtaaagctggttgagctggacttgaggtcgcataggggcttgggccacgggctgcgggggtggcatgtgatgaggctcgctcatgcccattccaccgaattgctgggtcatctgcgagacatctgcggaaacaggtgcgccgtatgctgcgggctgcatcatgttggggtccgcaccgtaggcgggttgttgataccctacaacttggggctgtggaggataggccccgtaagcacccccagccgtgggttgtccacctagcgcggcattggcgccagaaccgaaatcaaatgcctcaccagcgtacgctctcttcttctttccgcctgcagctggtgcgggtgcgccttgcccatataccggggattgtgtgggttctggggtgccgtaggcgggctgggcatagccttcctgaggggggaagcccccttgtggtgctgccattagagtcgagtagattgtgtttagtcgcacttaacggttgggaggaaaagagggttgcgcttgtcacgaagtcggcgggtggaatcgatgtgaggagacgggtggtaacagctcctggaaccccacaatcagtttctcgtcaacggaacagggtgaacctggttgcgtacggggtagctgtacctttagaaagcccagaagtatcacaaaaggcagtagcgaggcaaaagacagctcaccagaagaaaccaagggagtgtgggagaggcggtgatgatggtctacggtggcctttaggtcgtggcgctccagccaatcagagttcagagaacatgtgacgagaggtgtttttatactgtacgacaacatttgatatcgagtacgagaccatttagatatcaatgctgggatatttgcatatgcagatatatatgtactatttactgtcgtcgagctgacctatatatgtttctaagtatctgggctggtcagactgaacacctaatccctggtccaagcgtagagcacatccacagattctcctgtactgtcaattatgataatgagactacgcgatttgcaagctgattactttgctaaatttgtaccggacaattagatatccccattgtggtgctcgagtcttaagaatgtactagtatgtaagatgtgttgtcgaaagaggcggttgccctgccaacactaaccacatcggctgctgcacacgagaactcctccacacgttccacaaccttcagttctgcatacaccgagtagttagttttgtttctttgtttttagggggaggaccttattgttcttgattattgtctttttttggctttacatttcgttctagccattccttcagtttgttttgattggattgcatcgcatccctgacgaccaggacccagaccatcacacgacaattgaatgaacaccccgccacaatgagtgtccgagttgtcgcgcgtatccgtccccttctcaagtccgaacgggaggccgatgtgatcgttcgtacaggatcttccgccatcaccgataaatcacgccagtcaatcaatggcgacaagagtgacaagagtgacaagaaattggcagcattgagggacagagataatgtggttcgaattccgaaccccaagaatgagggggaggagtatgcgttccagttcaatggcgtgtacggcgcagaggtatcgcagcaggagctgttcgatgctgagggtaagttcttgttttaagctcatctggtctgcgatgggtcagtatattgatccggttcacagtgtccccaacaattaagcatcttctcaacggattcgacgtgacccttttcgcatacggtgtcaccggaacaggcaaaacacacacaatgcggggcgggaaaacactggctgaccggggtgtaatcccgcggctgctcagtggaatctaccgacgtagccggaagattgaaaaggacagcgagggagagacgacagtccaggtcgccctgagttattatgaaatctacaatgacaaggtgtacgacttgtttgagccgcccgagaagcgcacaatgtcaggtcttcccctgcgggataatggtggcaagactgtggtttgcgggctgagcgagaagccgtgtaccactttgaaggagtttgagcagctttatgaccaggctaacactaaccgttccacctccgcgacaaaggtatgataccacgccgaaagctagggcccatattctctcgctaaacatacaacatagctcaacgcccattcatctcgatctcacgccgttctcggtgtgaaggtcaccatctcctctcctgacaaggttcgcgtcagcactgcttccgctattgatctcgcgggatccgaagacaatagacggacggaaaatgacaaagagcgcatggtggaatcggctagcatcaacaagagtcttttcgttctggcacagtgtgtcgaggctatcaacaagaagcagcaccgcatcccgtaccgcgagtccaagatgacaagaattttgtccttgggacagaacaatggattgacagtgatgattctcaaccttgcgcctgtccggtcttaccaccttgacacaattagctctctaaacgtcgccaatcgcacacggaagatcgaggtccgagaggtcgaaaatgatcccatgttcaagggtccggcccggccatctattcggccatctatgggtacgcggcaacctctacgtgcactgactgcttctgtgaatgtaaatatgccggcgcctgctgcgaaggacaccgcagaaaaggaagagggcaaacccgttaaggcattcagcgtatactcggacaagccccaacccaagcttatcagccagatccgaaaactggaagcaccgaaacgcacctcaatctccaatgccccctccggccttccgtcattgaagcccgcccgtcagcccctgggtgtgcaacccaccgcgcgtcatgatgacttctcggctgctaggattgaggagatggttgagaggaaggttgaggagatcttagctgtgcgggctgtgagcgaacaatcgcggcagacgcaagtccatgagcttaatgagcagcttcaaaagcgattggagcagttggagcagcgcattgatggcacagaagatgcacgggctgagggtctgtcatacctgctgatggctaaacaacatcaggcacatggtgaagacgggtcagccctgagaatgtaccagctggcagctcctcacttccctcacaacgagaagctggcagccaagattgctgccttgcaggaacgggttcatgcaaaggcttgggaagagaaacccgattccccgcccaaggggaggctgggtagcatgctctcccttaagaaggacgtaacacaaaccctcggcaaacgccaagcagagactcatgaggatagctatatagaccagactcatgccggtttttcgagtggcgaggatgttcttcgccaaaaacataagaagcgtgctgcagccaagctcggccaggtcgaggaagcccccgaactccttgacagtgaggacccatccctctctccccgaactaagcatattctttccatcatcaactcgcgggacgtgagccggatcagactgctcaagggagtgggtgccaaaaaggcagaggctcttgttgattgcctctgcgagatggaccagcctacagtggatacaaccgacagcggagtcgtctcagaccagccccaattccaggtcaccagcctggcacaactgagccagctgaaaggcgttggggtcaagacggttcagaacatgagacaaggggtattggcttaattaattgttgcatcttttggcggcatataccggagcataacggtgtttctctcttcttttttttcatgcatcatcattcagcgacggtgctatggcgtttcctgtctatacttttgttgaatgttttgttctatcttctgaatccaccttaggtgctttagagacatcctcatcgcgttcttttgtcataaccctttcattatacttgatccaagatcctttccaatgtttccttggttgctgactagaagatatgaccacctcggtggacttatcttcaatacaatatcctctctaacattcctaatctttcatcctcgtggtcttggtataacccctcggtttaccccggcacactgcttcttaggacctgaccccaaactagcagccccatgagcaatccctcctatgacacgaacatagagcgacaacgcaacttgagtctgcccggggccgtgactccttgctcaagaccgtcccatatatccgaaggcccaaagccgacatacacggcgctgatagtgatgtggaggtactcagtgttctcgaggagtatgtcatatttcgttaactcttgtcctcaataaaggggagattatctattaaacatggagaattataaaagatcaaaacccgaaaaaaagtctagtctaataagacccaaaggccgcatagttataccttgttaagtttgaatccaccaacagcgcccctggcgaaaacaaagaaaaccgacccgacaatcatgacaacaccacagaatatctgtagcttggtataactgccatggagaacatccggcaccaaagcacctccaataggagtacctgtcaaggccgcaaacgagatgacagcaaagaaagtgccgttgcgcacgcccacttggcgaagatcggatatctgcgccacaagagccggtgcgagcgagacgaatgcaccagagccgaagccatatagagcgctgaacacaattgccggggcattgcctcttgacggtagccagagggccaggacgatgatggcggagaagaacgttgttatcaccatcatgttgtagcggccaactttgtcggcgtaatagcccgggagtgtgcggccgaggatactatttggattgtgttagttcatgaacgaggtgaagtgtatgaactagacagggagagaacttacctagcagcattcaaaatcggaatcagatacccggacagatcgccagacatgccatatcgctcggcctgggtaatcacaaaagtgaagggcaagaacatgccccagaagaagaaaaaggcaccagcaagcgtaagcgcgaacttgatctccgccaacggtctcaggaaaagcttgatatggaatggctttgggtgatgcggtaatctcgatttgagcgtgagattggcgatacccaacatgaacaaaatgaggaaggcgcagattctcatcgcccaggggaacccgactttgggaatcagttggctgaccatgatagggaagatgactccgcccagactcgatccagaggctgttacgccgagggcgaaaccacggcgcttagcgaaccaggtgctgacggagttgacggaggcgttgaagatggcgctcgcgccgattgggctgcagattccttgtgcgaggatgaattggtagtactctgttgagagggaagccatcatcaggccgaagacgtggaggaatgtaccgaggagaaggacccagcgcggaccgtagctgtcgaacatagttccgaagattgggccctaagaggatattaggatgggtcttcataaagctgactctgggggatgggatacgcacgcagaagaacatcatgaaggtctctagcgatgtgatccatgttactgtgctggtagagaactcgctcagttggtggctttgatagtatgtttggaagactccgatgcctggatgatatcagtatcccgttgggtccatgtattctgacagtacttacaattgatccagccgaagctgacgaatagtccacagaaagctcctaatacaaccagccatgcctgcgcacctccatctggtgggggaccgatcgccggtgcggagggtgctggaccagcagcgactgacttctcgacaggttgcgcttcttttttttccgatgggagtcctttctccgggtcattatttccatgcacactcacggcgggtgtggtggtggtactgtcgatagagggagccatcccagtctgcttgttggccatctttgttgacatagaggaagtttcgagtagactggaactgtaatctgctttgaggtattagatattgcattttgaaagaagacccccaatttatagaccccaaacgaagacgggaagtataaaattaagaaacaagattgtgcgttggacaagatcgattcgaaactcacctcaacgtcggcccaggcgtttggtctcaagcttcaggactcttgcagattacaatattccgagcttctggttccgtttcagtttcaaagatgctaagtcggccttcatttgggatatttaaaggagaaaagacctgcaaaaaaaaatgcaaagggacttcggtcaatcggtcaatcggtttctagctaagtccgagctgcttaattatgcttttcatactccgtactagtccagggaaagccctccagggaaaagcatcgttgcttcactgcgattggccaatatctcacagaacccggggtctggatcctcactggccctggaaggctgcagtggtcggacatgtctgcgatggcccgaagtccgaggcggatttagctagctcttcgggatattactcgtttgggcaatgaatgtcattcgagttcaaaacatatgaaacatatcattttggttagatgcagctgaaacagcataatctctgatattcattggctgttacagtcattttgaccaaaattgttcgaccttgtaccttttgtagggtctgtctgggaaaaggcgcacttttatatgtatgagtacgacgtcaaggtcaatgtaatagccagttagtagttatcactatggatcggattttggctattggatttggttgataggcatcgcatttgagagatacagcgccttccactctgaactatatagtttcgaaagtatgtacaaagtgagtccatactatagttactcaaagggagctgtgttgtacaacccccacccaacgtcacattataatattctacagctatcaatttctagtttcccaaattattgtcaccacgatggcccaagtcaacactctggctgtgagccttcaccaactggccaaaatgatcgaccactccctccttcacccaacagtgacagacggggacgtcatcgccggcctcagagttgccaaggaatacaatgtcgcgacagcttgtgtgaagccttaccatatccaactagccaagcaagagctccaagacacagacgtggagatatgtgctgtcatcggcttcccgcacggtaacagcaccacggaaatcaaggtgcaggaagccactgccgcagtcgaagccggtagtcatgagattgacatggtcgttaacatcggcaaagtcctcggtggtgactggggatatgtctcccaggaaatcgagcagatcaacaccgcagtcgtgcaaaagggcgctatcctcaaggtcattttcgaaaccgattacctcaagcctgagcatattgtacatctttgtaagatctgcaccgagtcaagtgttgcttttgtcaagacttctaccgggtacggcttcgtcaagcaggctgatggttcctacaactacaaaggggcgactgtgaagcatctcaggttaatgcgtcagtattccggccccgatgttcaaattaaagctgctgggggtgtgaggactcttgatgatttgcttcatgtcatgagtcttggcgtgactcgaattggggctactgccactgttgcgatcatcgaggatgcaaagaaacgggggatcggtatggatcggatcgaagttgaattcaagccaatgaaggaggatagtcaccgatagtgaaaggtgaatattgaaccttttacttagcggtttatttccggcagaaaatatattacagacaccgtactaaaagcaaagtacccaagttcacctgaatggctccaatccaatgtacagatacaacatgcttacagtacacaatagagcggtgtcgaaagcggtcaaaaatagaggtactaactcaggtactcaggatcaatatcactcgggggttgaaccctggtagctacctaggtataccgcttcgtatgaagaatattccagcttcctgtccctcttcaatagccttatgtggcatctttctcatacgattttctggagccatgtcttattgcattctttctactcgaaggtagcgaggattcgtatgttgtatatcagaagcaagaaaaagagatttgtcggcaattgccaagataaaagaaatgcccatactgtacaggatgtaacgtgataatcatcccaaatggagaccgctctagccctagcccgtacaaaacccaatgcgaagagaactcctccaagtcgaccctttcaagcgagtctttctatttagtttgtgcgagaaacttcgtcgaatttgaccttcccatctttgcgaatctctgcaacgcttcggcgcgtcccttcgatgtcattctctagttcctggacagagcgcgtcaggccagggacattgctgacggccttttcggcttctgtcctttcgtctactggcttttcctctatttccttcccgctttcggtggaccgaggagcggatatactaggggacaaggtgaagccactagggacattggcaatctcattaacttcctgcgcggacaaaacgtcgttgaggcgaggaccacgggattggatgaggacggttgtgggaccatcaaactgcaggaagagctagacgacattgttagttggcaaagaatgaaggaccaaaatggggtgccatactctatctccccagatggtcattcgagaccaagtacgcagcttgtggaaccactgcatagcaattttgtatgccttggaatcagacacgtcacgaacgaacttggcattctgtagaagtcttggtagcgtcttcagacccggaacctggaagttgagagtggtggatttgaaacggtaggggcgaggaggattggaggccatggtgtaagcgaccacattgctgtcgatcagatattagcgacgtcagtgcaatcgcggcgagggtcatacctgggatgcgcaatgtattgctctccatccttcaattcgacagagtatagctgtccgtttccgaccaacgctattaaacctctgccggtcacctcggagctaccccaatgagacaagctctgcgcaaattagcttgatgtttccccacggaatcgtagttccactcactaggtttgcgttgatagtaggcttgatggtcagagaccggcccgtccatgcaagcaaagcccgtctttgggcaaccatccagtcaacggaaccattgacgttgacaacggcgaatgaggtattgggcgatcgaacggagacaagagctgtgacaggacttggcgaggagatctaggaaactgtcaatcgctgtcttcaaatccgcatctgcatcgcgcatcttaccttctgataaagaaatggcactccgacgatagccctccggaagggttctagaacgctcaatgtggaaatcacctgcgcggattatgcgttagtatcaccattccttcgtgacaacatcatgacgggatcgtgtacattatccgcctttccgctcaatccaaccagcgttcctcgtcgtgtgtataggttctgcgaggccgagagcgaaaccgaaagaagcgagtatggagcgccgacaacatcgaagcgcgcatctatgtgccctcatggtcagtgccataataatatgtcccggggcaattgcaattacctcgtgattcaacagagctgggcgtgctagcgagtggcagattatcgccactaaccgaaggcactcccgagggcgcggcgcgaatctgaacgcatcgcgtttgccggtgaacgcgaggaacgactcgagtccaggatagagggcgaacaccttggagggggcgcatggtgtttgaaaaaagagcaaagactaccgaagggagaatttacgtcagttgtgacgaaagggaaatcgggaaatcgtgggcccgagagccatgcggcctacgaagtacacaactgcccctctgaattgcgacatttggaagctttattataagaagtctttgaattaccctcattctccctttacatcttacttctgcttgactatttgcgaccatcccggagtcgaatcgagagcgacggtttttactccgaagccggcgatttccccccacgagctatccggagacatagctaccttgcgcgccaatctttcttacttattccgaagctcctctcggtggtctgaactactcaggagcttagagaatattattcctagcggccatgctgctcagagccgcacgatcgccgtgctggcgcacagcacaattcacctatccgagcttcgccggcaagccacgaagcacacgactcaatggaacacacctgcgcgcattcacatcaaataagagttcattatggagtcaatccacagacacagacaagaaagatcacgcatctgtcaaagctactcctacctctactcccgcctcatcacaactagcagacgccaatatcatccagaagccggaaggtagcggcaatgcgaagaccccaccgaagaaggacttgctgagcgagccaatggctggaaagaaagaacaaagaaaggctgactgggctattatgaaagaaatggccaagtatctgtggccaaaggtaagcctcgagtgcaattggtatggagtaacagggtattaactatagctggtaggatgattggggcacgaagctccgtgtcggcacagcactttcactgcttattggtgcaaaggcaagtttcgtctgttattgtgttttcgttaaaatatgcttatatgaatccaatagatcctcaatgtggaaatccccttctacttcaagaacattgtcgactccatgaatatagactttgctaccgtcggtggaactgcctataccgtggctgggtcaatgattattgcatgtaaggataacagcatatcgaagagagacttgtcgctaatatgtcttagacggtgtgacccgaatcggagctacattgtttcaagagctccgtaatgcggtctttgctagcgttgcgcaaaaggcaattcggaaggtggcgtcaaatgtttttgaacatctgttgcgactggatctcaacttccacctgtctcggcagaccggaggtctgactcgtgcaattgaccgcggtactaagggcatcagcttcctccttacctccatggttttccacgtagtaccaacagcacttgagatttcccttgtctgcggtatcttggtatgatttggaacctatatttacgtttctatcttactaacgcgttgtagacttatcaatatggcctccaatttgctgcgatcacaacaacaacaatgatagcttatacggtgttcaccatcactacaaccgcgtggcgaacaaaattccggagacaagccaatgcggctgataaccgcggagcaaccgttgctgtggactcgctcatcaactatgaggccgttaagtacttcaataacgagaaattcgaagtggcacgatacgacaaagccctgaagaagtatgaagatgcatcaatcaaggtgactacatctctggcattcctcaactctggtcaaaacatgatcttctcctctgcgctggccgcaatgatgtacctggcttgcaatggagttgcgaacggaaccatgaccgtcggtgacctagtcatggtcaaccagctggtcttccagctctcagtccccctcaacttcttggggtctgtctatcgtgagctgcgccagtccctgctggacatggagacgcttttcaacctgcagaaggtgaacgtcaccatcaaggaacggcccaacgccaagccgctgcagctgacgcagggcggccagatccgctttgagaacgtcacgtttggctaccacccagagcgaccgattctgaagaatgccaccttcactatccccgcaggacagaagtttgccattgtcggccctagcggctgcggcaagtctacgatcttacgtctgcttttccgtttctatgacgtccagtccggtcgtatcttgattgacggccaagatatccgcgatgtgaccgtcgacagccttcgcaaggcaattggagtggtaccgcaggacacacctctgttcaatgacactatcgcccataacatccgctatggacggattgatgcgtcggacgaagaagtgcgccgagctgcggaacgagcccacatccacaagcttattgagggtctgcctgatggctaccaaactgcggttggtgagcgtggtatgatgatctccggaggtgagaagcagcggctagcaatttctcggttgatcctgaaggacccgaaactcttcttcttcgatgaggcagtaagtgatcattccttggtcccacttgattgagataactaatcaccctctctatagacatccgccctagatacctacacggagcaggcgctcctccagaatatcaacagcattctcaaagagaagagccgcacaagcgtgtttgtggctcatcgcctacgcactatctccgacagtgaccagattttggtcttgaaggaaggtcatgtggcagagatgggctcacaccgcgagttgctcgagcatgacggcacctatgcagagctttggaatagtaagtcctcttttctttgctgttaatactccttactaactcaatttcagcccaggaacagacaatggctcatgatgggagcctggagcagagtcaggttgaggatgttcagcccaaggcgtgagatcccatccaacaagtgttaggctactattaagccgtactgaaaagcttgcagcacatagcatccgatgtaaacagcatcatgcatgtcttcggtgatagataacaataggattatgcacaaaagataacgtggactagttcctcatctatagatttcatgattcgctaccctcacggaacatacaccataggtgctgatccatccttgggctggtgcttgccttgagcaacacgcctattatgaacgacataaataacaatctgcgctgcagcactggcgattcctacagacaccataatgatcatggtacgtaggcccgtcgaataacttgagattgatatcagcaactgtccagtaattaccttcggagaataccttaacttacaatggtttgtctcctgcttggaaatactgtgtcccaaccattaacccgcttatcgcagacataacccacatcctgcagtcaactctcatcagctctagtcaagtcaaaataggaatataggaaaaacgcacgcgatgctgatactccgctcccttggatctcgacagttgatctgaacccaaaagttatgtatgggatgatatcccacagcgaaactgttcacagcagtccatagtccccaacgcgaccatttaccgacatggggctggaccttgaaatttactatcaacacaatcagatagcaggcttgagcagctatcacagttgcacctctgaggttggtccggtcacttatgtaggcgaagaagaatacaactccaagtgatagggacgcgccgactgcagctagcgcgtttgctgctgtcctgtcaaatccgagtgacctgtataaatgagcttcagatccatccatctacaacggcagtgaatactcacatgatgatggacggcgtgtaggtggttagaggactccatgtcgaaaacacgacgaatgtagagatgaagtgcggccagcgacggtagcaacacacagtacgaaagacaactttcaatggaatgcgcacgccatacgcgccctcggtacttccgccattgtcgtattcgagtcttttttgaagaatctccttctcggaatctgtgaatttgataatccccgggctcaacaatggccgggtgagatcgggtgatccaggtagaaatagtaataggaggaatgagacagatatagtgaacaacccctcgactgttgatatgttagcgaatgaagtcttgtatttagaagatgcatacttaggaagagccaccgccatcctcgaatgccgtgtcgaccatcaagaagcagaatgccagaggctaggatagggcttagagcgttgccgccaaacatcccaaagaagaaaatcgcaactctcttagctaattctcttttcgtataccacgacgacaaagtatagactgcaccgggaatatatcctgcctcagcgaaccctagaagcagccgtatagccaagaaagatcctcgattgtggacaaatacttgcatggtagcaagtaagccgaagagaaagacctgggccgaaatccacttgcgaggaccaatctgccaaagttactattagaagcaggccttccagggaactggtactgtacatactcgttgcaaggccatattacatggtatctcaaacaccacgatacccataaacatgagctgatttcccaaattaattgtggactgtgaaacgttgatatcagcggcgaagccaccagtcaatgcgctcgcaatattcatgcggtctagctggaaaacaagaagaccgagaaaaagcagaggcagcaccgacatatcgatccttagagaagttcatgtcagcgtctaatcctgatacttcatctatggggtgtcattggtggttactttctgcgagctttttgctcatggctgggttcccattctggtaagggcagcgataatgaagtagagtgctcagaggcgctatccttgagatctagcttctcatcgttcattttgacatccatattatatcatttccctccgttagacgtggatggtagaagagacctaacgacaggcaaggtagagataaccgaggatgaatattgcaagtattagctataaattatagacatccctgcaagatattacctcctctgccatatcataatttataatatggcgtgctacggtaaattccctaaatgaggcgtaccagaccttcaaactactataaaaccacaatttttctctctgggcgccgcgctttaatatcaacgggatttgaagggatttgaagacaaaccgcccaagtgaagccatgtggattttcttccttcgtaactggttggctcgacgccgtagccccgcgacgccaaattgcgtgacaaggcccagaatcgacgacagcagcgaaccctagatcggtgctaaaattccccagatcggcatttgcgacgggatctcgcctattgtatctatatatcgcaatctaacctcgggatgaatttatagctgtcttagtcctcaatctctatcatggtgcctgttaaacgcgttgcggtaatcggcgcggggccggcaggagctattgcgatagatgctctggcgcaggagaagacctttgacattatccgtgtatttgagcgtcgcgaaggtcctggaggctgttggtccgtttatcttctccggagcttattcgcgacgactgacaagaaaccccaggattggcgattcatcccagcctccaacgctccgcgacttcgcatctctggcgacgagaacagctgatcctccactacctatcccccaaagtttgcctgcgcagactctaaaatcggatcagcctcgctttactgagtcgtctgtttacccctacctggaaaccaatatcgactttctgcctatgcagttcgcccaggaacctttcccagaagagcgcagcgagctctccatatctcaccacggacccgaaaccccattccggaaatgggatgtggtccggaaatacgttcggagtcttgtcgagcgccggggttacagcgattgggtctcatacaacaccacggtcgaacgggtcgagaaggtggggacagagtggaaagtaacactccgaaaagatggagagaagagtgattactggtgggttgagtggtttgatgcggtagtcgtggcgagtggccacttctgggtcccctatatacccccaatagaaggcctggaggcatttgagaagaccagaccgggcagcgtacttcacagcaagcacttccgtgggagagataagtttgctggcaaggcaagctaacttcctcacaacaaaatttcaaggttttagggtcatcatgctaacgtaatgtcagcgagttgtggttgtcggcgcatctgtctcagcagccgatatcgcagttgatcttgttgaaacggcaaaggaaccagtccacgcaatcacaattggccatgctgccaacgggtactttggcgatgaggcatttaaccaccccaagatacaaaagcacccttcaatagaacgagtctcgaacaggactgtgcacttgacgaatggcaactgcatcacggatgttgaccacacaatcttcggcacaggctatagctggacgctgccattcctcccagcagttccagtccgcaataatcgggttccagatttgtaccaacacgttgtttggcaaaaagacccgacattattgtttgtcggcgccgtcgcggctggtctgacgttcaaggtctttgaatggcaagctgttctagccgcacggttgctggctggccgggctaccctaccgtctgttgaagtgatgcaaaaatgggaagcggatcgtgtaaaagctcggggtgatggcgtgaagtttacattgatcttcccggacttcgaagactactttgagacggtgagacatctagccggcgagggggaggagggcaagggacgaaagctgcccaaatttcgtcgcgaatgggtgcgggcattttttgaaggacatgaacgccgcaaggccatgtggaagcggttgaacctgaaatctcgagcagctttgatgaataccgagactacacacaaggaagtagctcggctttgagtttaactgtatgtagttatgcctgcatacacggaccataccctgaccttgacacggcagcatggtcatatgaatgtggctgcttacctttagactgtatgctatcagtttattagcctacttctggccaacgactataacatcaatgaaccaaatacttagaacacaccttcattacttatgtcagttcatagcctgtgttgttttttatagatctaatgacctatgaatatactccctacgagtactaattcattcgctaccaactatgcacgtagtctcatcaattattcggcttgcccgggtgtttggagaagaaagctcgtaaaagttctatcatgagaccttgtgcactatcaaagccctgcgtacctctcttagttatccactgcatcccgcgtaccggcattcacccgcgtgcacagggtataaaaggcctcttgtccccagaaatcttcttcttcttttcttttctcctcatcccccttcccccttctagttccgacttcaactaacgtttctgcagatattccttacactgcatcactgggcttacactacccccggctgatgcgaaccccctctgactgataggtagatctgacgttaccgcatatcttcctagtcttattttttgatctagcgacttggcctctgtgcttgcatatgcctcgttgcactgtatcactgggcttacaccacctccagttgatgcgacaggtagatctttctattacttgtaatctttggacccagcgacttggcctctatattgcatatgcctcgttgcactgtatcactgggcttacactacccccggttgatgcgacctttctcctttttttcatcaattattcggcttgcctgggtgcttggagaagaaagctcgtaaaattcccaccatgaagtcgcctctcttaccaagcgtacctgcgtgcacccgcgtatagggtaggtataaaaggcctcttgtccccagaaatcttcttcttcttttcttctctccccatcccccttcccccttccagttccgacttccactgacgtttctgcaggtcttcctaattctttgacctggcgacttggcctctgtgcttgcacatgcctcgttgcactgtatcactgggcttacactacccccggttgatgcgacaggtagatctttctattacttataatctttggacttagcgacttagcctctatattgcatatgcctcgttgcactgtgtcgctgggcttacactacccccggttgatgcgacccttccccttttttcatcaattattcagcttgcctgggtgcttggagaagaaagtttccttgattctatagtcctatcttatcctagcctttcagctttctcaatctcatgagtccacttgcattatttgaattcaatattcccaggtcgcctgcatatatttacgaaataggaaagagactggatgatttcaaagtttgacatatacctagagccttaagccaagtgttaaagtccatcattatctaaactacctaggcactgcttatggtatataatccattgacacggtgaggaattgtgtaaaacctctcctttctcagggctttgtccctttggcatcattgttaatcatcacttcttgttcttctcatatattgtacctctgcgcatcatataattgacggataagatatgttcgactgtgatagactacccaatagaccccatttatgcctagtgctccgggatcactctcatttttgttatgcgggcaagggaggtaagatttgattgtctatagacaaacagaaagtcgctaaatagctattttgcagccggccgaactaggcaaaccaggcaaggccggtgattgtctcaaattctttcatctcccaaaattctcttcatctagacacttctactctcccatctatcttaatcatctttcaccaagctttgttatcattggaacatagtgcaatatggaactcggacgttatatcttccagttaccctcggacgaggaactccaggtcttggagcagaagatcaactattctttttccaaccgaactctgctccgggaggcactccaacccgcgacctgggttaacgaagatggcaataagaaacttgcaatggtgggcaattcaattatgcgcctggtaattgtgaatcacggcctcaaaggaaagaagacgcgtggtatgtgtttctctcacactggctactatttcacaaacttacgatttcggctctggttaggtcaaatctccgatatgttcacccttaaggctagcaaatcctctctttgtgcgcagggcttctatctcggtatttccaaatttgtcgtcaaaagacctacccaattagtcgttggaccgactatcatggcgaccaccatggaggcaatcgtcggggcagtctaccttgactgcaatgagcagatccagccgtgtgccgttgtcatgaatgcattggatattgcttggtctgagtaaacaccaatcaccctacagtgacatacagtacccctgatatgggggctggcgagattgaccacagcctgtatgagtgtttgattcaacggtggggttgcttgcaatgacttgcatgctgcagcactatccaatgagtcttttccatacttttaatcgattccgattgatcctgaggggctctgtacattcccgtggcttggaattggctcctacaaaaacatactgagagatattgtggagaggacgagaaaggatatggttcggagctaagagaattgaatagctgttgcactgattctggtaactattatcttcgtctcgtcgtatgtcctcatggacatcagctgaatgcttgaagcacaggtagcgtcgtagcgatgtagagccgatactgtactcaaaactgcattttggacccttcttaagatattgactgactccagctttgctgtgctcaagattctacagactaactacgtcacgcgattgaaacttactaatcatcttgggcgccagatttagttgactaggcgatcccatgaaggcgatatggcggatatcccaagtaggcctattgccgccatgggtgacttatttacggagtactgttggctaatactgccttgccgctgattactctttcgctgatacggttggtctatcgtggaagtgttgttctccaatgagaaggatgtctagactcggcgatgatacgagtgccacagtgaccggggtatctgaccaaagcgtgccttaaattgacaccattgggggggccttgttgactaagataggggtgattgatacatccgatctccgttgataccaaaaaagcgagtgcgacgaattagaagccaatatttggatactccaccatatgatcaatagcatcgaaccttggagtaaacaacggtgtagcgagcgcacggagttctccttgttttttcttttccaacatttcgttttcagctatcctaacatcgcgccgtactgcgaatccaagttgtctaatttttcacggggtcttctcccactaccttcattatgacaccacaggtcaaaatttgggccgactttgcccatgtatccgaggaatctgactcagaaaccaatgaatttcaatacaaaatgttcgctgtcatcaactcggacgatgtcatctactacggcgaactacctacccgcaaagccgagacctcgtttcagcaagtcatggccaggccatgctcaagccaatccccgacagcgagatattatcagagtcgccactgtctggcgacaaacccttgactcaggcgccactggatctccccgccaatgttcaagtcttcatcaagcgacccaacatgtcccaatatgatgtgtattaacgacaaaatgtagtacacctgctcgcccaaagctttttggaggaggcccgtaccatggaagttcttgccgtacacctacatccttatttcgtccatactacggctgccgcttccggggaggctatataaccggaatcgtgctcggccgccattcgcacgacctgaagaattatctcagtggcggagtgagaaatatcgataagaaagcattcatgaatgtgcttgagtctgctatctatcacttacattcactcggtttggcacacaatgacctcaacccaacgaatgtgctagtcgacgactccgaggccagtggtggaatgccagtcctgattgactttggctcggccgggaaaatcggcagcttgttgggaacatcccgcggcacaagtggttggattgagggtcggattgaggactatggcatttcgaggaaggaacatgatacctttgccctagagaaaatgcgactccggttggacaacccgactttcgacgatgattaatggggaaaatagtgatatgtagagcctatccgccacatggcaaaaagcaagagactggcattgtcacaagtctgttgacaataccattactaccctgtagcaatatcagtcatggaactgccactagattgagataccctgtattacagtagagatccattacgtcttaccctttgggattattggatcgaaattacaatgtcgctagacagagttcatcgaacaatgaatatgcattgtttgtaattattaagagggaggtcgatcaaaaaccggggaaaaggcaggcaagaagaagcctctttcctcacctttgccctcaccctcatttctctttgtgattatttgcttaggtatactcgttttcttaccccgagccaattatcaaaaagagaaatgacggtgatggcaaaggtgaggaaagagcctcatttaccggaggggcgacaagctcttatttgattttcggagttgtcaaaggcttcttacatgctttttccccggtttttgattgacctccctcctaataatcacaaatagtgcatattcatcgaaaataaaagagaagttgaaatcaatacagattggaattggcaccagttgtatatgcttggtgaaggcggcgataaatggcggtcagggatatgcccgtacccgaggcccagcagagctccaaccaatgaagatgaagcaggagagtcaatggagatcctttgaggcttcagccttagagcccggtctttattttctttcgaaaacacaacatgaccagcccaattgcgtatatttctccaccttcagctgagccacgcatcttgcttgttcgatcctatgccatacgagcgtctaccacgctagctttacggagtacttcagctttagaaattcaagcccccagcgcgccatatcggagtacgtggaataagatacggtattatctgtcagcggtctagacccgaacttgaatactgatctagaaaagaaaagaaaagtcttcggctagagctacaacaactaagcacagggaatttacacaagactcgaatcttcgcatctcgcatacgtgcatcaaaataaattgcccaagactaggattgctgctttaccgaacatatccaggcagccccattagaaacggcacataatctcccgggactacatcgccagctccccagtccaagatagcgaccattaactgcgtgataggtcccaaccatatggcagcgctctgacgcggctttcgatctcaagatcacgtcatagtatggctggcgaactttccgctggacaacgtagagggtctttccgggtctcagtctcggacactgcaacggttccagcagagctagccaatcggaatggcccagttcatcgccaaacaagataccagccccctttcctcccctgatcggtttcaggaggtagtcgttttggaacgaatccgagactttgcaattctcgataaattggttgaatcccgtcgagcccgggagaattgtgtgcgccaagccttggttaaggccttcggcctgtttaggagtgatgatgttcctggagactaaattgttgagttcttcaagaacaagtcctagcatcctcttgtcgtgagcaagaaggatagttcgcatgtcgttgaagcatcgcaggctgatctgtcgtttcatctccggatcgagagcattgatctcccgctggtggagttcaaggccaatttggtgaatctcttccactatttcgccggactcgattgtgattgtctcaacagcatctgcttcagcgagacagcatagcttgtatccgtttcccccggagttggagggatctggaatgagtcggagagtatccggagttatgagtcgcagttttaatccatgtcttttctgagcaaattcgataaacatcccgatatcaatcccgtgctcttcgcctttgataaggtgcaaaggaatctcgttgtcgaacagttccaacaatccaccgaagacctttgagttaaccattagcaatctgtcttagcccagatatcaaatctccactcgcttaccgtttcagcttccacggcgttagtcagacctcgcgatccaagattgaatgccgaaagcgaatcttgcccaaagacagtatgcatgtacccattccagcagaacctcgcgttgatctcacagatgcgaaaaacctccccgccagcttcatctttctctaccaaaaagtctggtctccaagatccttgtcgttcgctccacggtgcgaacaggtgtcggtttgagtccatccactattgtaacaaccactcagtaagccaaaccgagccgtagaagggatgtagcttacgcgcagtaactcttcctcctcctgctccaacggcacacggagaggaaaccgggcttcatcatccgtccaccatcgctcgataatatcctcgatggccaatctcagagcgaggtgcaaatttctcatgttatcatcgtgccgttgggtagttaacacagggaaaggacacgatgcatccagagatccggctggccaagaagaggagcagtcgctcaacttcgagatataactgtggcggcttttgcccaagaggtctacatctagcccttctgctgtcactggtgagtagtcgacggcatcgtcatcgggaaagctgatcagatggagaggtttcattttgtatgtggatattttgtgttgataatggaaagacgggatgatatatgtccttcatgtttgaatcgaactattcaactagtggttatcccgagctgaggtggagaaagccagatctagtacggagtacttcgtagacgatccctattttctgatgttctctgtatgtatgtatgtaatgtgatgtattcgtgtacagtggggcctctcgggtatatgtgggtccaatggttcacccgagggatccgctataatgtggggccatacaggcagattttgactcgtattgacttgcaattacaggtttgagatcgtatgtacgactatacatataatacagcattgaaacattcatgagcttccaaatggtgcggcatcccatcggacacgccgaagatgtcggttggggtctttgacttcattgcgcgaatgcagccatcggcgattatccatcaggataattgatccttggggaagacactggggtgtgaggtggagagtctcatcccgggcgccaccaccgtacagaatttccttcagttcatccagtgccttggtagcattcggagtcaagggaaccgtgatatcttcccgaaaccgcaattgactgccagacttcccgtcaggattcacggcgagcaaattagccacgatatgctgcttccccgcggttttgataaactcgggagggactgtaattttgtagttgtggctggagagccatttttgcgcgaaaggcgaaagcaaggtaaggagtcgatcgacgttcaacacagacaacgtcccgccgccgcagcggtccggctgaaggacttggagggcgaagaatctgggtggttgctcttcatagctgcagtcggtgtgccattcaaatcggaacattgtctctgatcgggcttggtggccatggctttggaaactcgctggggagggccgaacatcccagaaccaaccgcgctcggcgctgtgtgttattgggaggccgtggttgtggtttttgtggagattcgatatcagactctgcagatatgtgctgttctcgtcgctaaaccctagatgtacttggagcacacctttcgcttcgagggtatcgtatacggctctcaagtgggaggcgtcggaggcgagtgctggcttgggaatttcgatcagggggacgagtttggaggttcgtagatctcctgttatagtgagtatgagaagaagaaaataacagacgatacatactgatagggcgggtagaataacttgccgtcagtctggctgtagaaacagcacggaagagttgatgcattttgtgcaaccaccatgtaagatatggaagagcagtcggcgctcaattacatatataccaacagctccaaatgcaacgaagaagaacaatatcacgaatatatgcagcataccctgtgcggaggacagagtagaggagcaatatatttcgactggtcatatagggaatgagacacatatgtagtgtaatgctgtatgattggcatgcagattactgcgtacagcgtatggtacaaattatcagattaattgcaactcctatagatgcggctgagctgacccactcgggaaacacggagagcgcaatgaatgtgtcgtacgtacaaagagagacgaataagaatagaaataagaaaataaaaatagaacacctgaaatgggatctcatcccatgtaacttaacttgtcagggcttagttcaggacatcgacatttaaactagacgagcctatacggcgttggacacttctctccaacttccaacaacctcgccaacatgactgtcattaccgaaaagaccttaccaataggctacaattggcgttcctccaagtggttcattctctctaccatcgcaatcgcgttgtttgctggtctgtctgcccctagaataattgaaacaacacaacactaatatcgagtagaaacattcctttatggcttcctagttcccatcctcggagaaatgcttcgggaccgcctccatgtcccgccatctcaagctcaggagttaacctctgccgctcttgccctacatggtactctcgccatggtctccggccctataatcggtcatttcgccgacaagaatacaggccgcaagaccgcactactattatctctcggatggtgcattgtcggcacgtgcatggttgccggcgctcattcagtccctatactactgctcggccgcgtgttgcaaggcatcgcagggtctgctgtgtggattgtcggcttcgcaacagtcgcagacactgtcagtccgagccgcataggtttcgcaatgagcttaatgatgtcctgcgcaaacaccggagtaatcagcgggcccgcgattgccgggctgctgatagaggccaccgggtactggataacatggtcgatcccgctcgtggtcctgacgatcgattttatcgcacgcgtgtgtatgatcgagagtccgtctagtcctccctctatgccaaccgagactgcgagtctgctttcctcttgcgaagagcagcaaattccatcccgaaacgatagtttctggcggacaatgctatgcaacggccgtgttgggacctgtctgctgattataatctcgggtacaaccgtgagcacgagtttccacgcgacgcttcccctccacgttgaagagacattcggatggggtcctcgtgccgtcggattcctttttgccggccttgttattccgggtgtcgtgatcggtcccattgctggctgggtccgtgataaagtcggaacacgacgacctaccatggtctgtgccgttcttgaggcaatagtacttggcctaatgggtattgctggcgatattccttgggcgggtgctcgaaatatgggtaaaccgctttacgtcgcctgtatcgttgctataggcattttgcggccgtttgtgtctggcatcgcgccggtcgaactgacgggtaagtcgtctctctccggctatgaataagtgctaaaaatatctagccactgccaaagctatccaggaacagtccccagggacatttggacctaaaggaggcatgtcgcgcgtattctctatgatggatgttgctgattccctcgggatgatgattggtccaatcataggcggttcgctgaaggaaatggtcggctataaatgcatgagctggacttggagtaagtggtttgatcttagtataatcgggtaacttactaatgatagcaggtctcttatatctcctcctcactgctcttgccatggtcttcttaggatcagaagatgctgaggaagaatagttcgggcgactgtgtactttgttcctgtttttcttttccatcggaatacggtgacctaattgggccatcggacccacatatacccgcgttccaagatttggcccgacagctcgggaatgaaaataccgcccacagatataatacggtattctcattggtaatttcaattaatacatgaaaacactgcaccgggtatggaaatagagtaaatacacgtaaactttttattactccctcgcgatcgtccggtggagacccgagatctgcaggcactactcagctgatcggccttcatgaggtcgtctccatgaactagtagctactccatcgtactccgtagctcagctactccatacaaagttcagctactccacgtcacaaattcaagttcattttggtttttctctgccttgtcttgatccatcaatatcaaattcaaatattcggagtcttctcaatcacaattaagcctatcgccccgactcaccctcccgcaatttcctaccttcaattgagattgctcgtagcagattctcgcaatggcaacggaaaggtattcattagcagaggtgctagccgtcgctaagacgcaccctttctacaacccggacactgtataccctgccgatgcagaaacaatccggaatcttcggaagacggtcactgaccaagaggcgaaggctaaattccaagagcagccacttcttgaaaagaaaacactgtaagacaatatcggacatccttctacagtagttagctaggctaatttagctcaggtacaaggccattgaacgactctcacatgatgtggacccgcgcaacacctaccgacaaagttcctacgtgagcattactggcggtggttctggcggggtgccgatgatgttcgccgtggatgtgcacgagaaccgtcgacagagagcgcaatttggggaatttctcaaattgtgcggtgtcattcagcctggagattgggtcctatccactcatgtagcgggagggttttacaggtactaagatccgaattgcacgagacggcgcgatatcctaactaagaacaaggtccctcgatctcacgacggaaatcacagaaaacgccggagccaccgttctcagcgccggaagctacatgtcacctacggatgttgctaaatccctagccgactatcacgtcaacatcctaaccggtgatggaagccaggtcgtccaagtcgtctaccacatctccctcatggcgccggaggatcgcaatcgcatcgccctcgacaaaatcatctacacctccgagcccttaaccggtccgcagcgagcgttcatcaaggcggttctgggcgacgtcaagataatttccctcatgggaagtgccgaggcaggcccctgggcaatcagcagccccgatctgaccggggagcagagcctgactaataatagcacggacttcgtcttcgacacgcgcaacatcctgatcgagatcgtctctccctctgccgtcgacggcgtatcttcgcctgatccaatcctgcttccagaaggagaacaaggtctcatcgtgcagacatctctccaacgactgcgaaacccgctggtacgctacatcactggtgatatcggcaccctacaccccctcccgagcgcagcctgtgctgtaatccccgaggcggatcgggactatatacgtgtgttgcgcatgcgcggccgcgataatcgcttcagcttcaattggttttcctcttatttcgaatttgagaagatcgatgccctcatgcgggcggacgactgtggcattctgcagtggcagctcattatggatcgattggagagtacgccgcaggcgacgctagagatccggctgctgaggtcgccgcctcgagacggtattttatcggatgatgctcttatcaaccgcttcaaggctttctttgttataggttcggataatgaggaactcttccgaatcgtgtttctggataatcttggaggattcgagcggagtgctactgcggcgaagattattaaatttgtgaatcgatgggattgaaccaaaagtattgtctcttctgttgaatgtagagatcaaatattgtttcttcatcctgcggactccgagctttaaatccggtaatccggcttatcggatcgcatccggacttcgatttaacttcttgttaaatccgtttatagttggccaacagtccaatcagaatcactgcttttccagtgtcacattctcgctttctctattgagatggccaggtcgacagtctacggtctaccttaactccggcatcgccatccctcaaatccatgatactcactttgtttaaatagataccccgacccttgattctatcaaatatcaaatccatcatttatttccaagatatcccatctacacattctccagagccatgtctctctctggaaaagtcgtcctcatcactggctcctccaaaggaatcggaaaggcaacagtcctccgccttgccagcgaaggagccagcgtaataatcaactacctctccgatgaagccgcagccaacaaccttgtcgcacagatcgggcccgaccgcgccttagctgtccaagcagatgcatccaatctgtccgatctcgatcgcctcgtggattccgcagtcgccaagttcgggaagattgacatcctcattccaaatgcaggaatcctcccaatgaaggacttggagaatacaaccgaagcggattttgacaacgcatacaatctcatggtgaagggcccatacttcctagcccaggtaagtactagattacattcttgtcctaaatcatagcatttaatgatactaaccgtgttctagaaagccacaaagcacatgccctccggtggcagggtcattttcatctctacagggatcactgctctttccagcgtcgcacccgcctatcttctctatgcgtctgctaaaggtgccatcaatcaaatggctcgtgtcatggccaaagacctggcacggaagaatattatcgtgaatgccgtcgcaccggggcctaccactaccgagctcttcttgaaggggaagtcagaacaggtcctcaatgcagtcgctgggtttagtccgtttggtcggattgggaaaccggaggagattgctaatgtcattgcctttttgtgtggagaggatagtagctggatgtcaggtcagattgtgcaggtcaatggcggaatggcgtagtccgaccgcggatatttgctgtcaacacgcactttacgttcgtcaatgcggccataggaactcgagcctgaggctggtaccagaacttgactctagatggaggctacttttgtcctatgttcgagagacttatatgtgcaatgagagaatcaatgaccgtgtcatttctgaaaaacacgtccatggcgtctaaagcctgtatgaaggagactgctaagtttagcgtcgatcactgacaaccataattcagtaccatttccccctcgtcaagaagtttttgcggttccggaagtaatggaagaggaaagatgcaaccagctgtttcatcgtgcgaacgactattttccgggtcagagattttgacaaagataaacaattctggtcggttctgacttacaaggagtacctttcattgttatacaatgccttgtagatcctctgctgttgttctttatcacgaccatagtcgaaaccgactgctttcagaagcatctcgctaaaacagtattcttgacagaatagactggcaaattccaacagtctcggataaaatcccgctgatacccagtccaataaacagacacggccatcatctaaccagatgatgtttcggggggctatgtctaactgacagagcaccagtggggtaggatcaaaatgaaccttaccatccccgggaaaaagccggctattgaaccattcttccacttactgaacattgctaatggtcagatcatttgtatttggccagagaaagccaactgaagagccaccacacaggctaccagccctatcggcggtaatagagcgaaaatactcaagaatgtaggcgagtctttgaatgtgagagtctgaaagattatcgataatcttgccctgaataaaatccgatattatatagccccaatcctcatcgtccatgaaaaatttataaaccgaagggactgtaacgatatctggattaattatgctgtatgctttttgctgattctttgcctcatgggaggagacaaaggggccaaacttgactaccaagtcacaatctggtagcttaacgacctggttaccagacctcaatcctccagtaagctgatcttctggacaagaccggcaatagtcaatgatcgactggttattgtctagttgaacagtcatggcagcatcagacattagaaggggggtagacggagtaagaatgggaaagaaaacaatggtacacatgatctaccgcctcggataatagatagtcccttagctagccatacctgaccaacttgaattcaaggaaatatggtaaatttgaatcaaaatcaaattctagcagatgcctggcctattagtcacataagagtcgtggttcataactagttaccggtgctgcaacagatggggggaggtggtatcattttcactccatttttacctgcctgcctgcctgccaccacaatgcctgctaatataataatgaacccagtcagcatggaataagggtagtcccttacaccgtgcggcgtggcggcggtaggggcagggccagggggattcatattgaaaacgccattagagatggcatcgaatatgcattcaaagatgagttggttaagttcatagacatattggcgggtatagtggtgggaagcagacaggcaggtaaaaacggagcgaaagatggacattggagtcacgaactgtctgaagttactttggacattgaattcttatttatagacgacacgaatcatgtgatttactagtaattagtaatatagggacccggccgggaggctttacatgaagtttaacctagcactacctgctgtcttttgtgaaacgttgtatttttatattttttgaaaggccgaaaggcctatggtgatgcgaccaaatctcttccttgactcttgctctagccatatctctcgagaggaaaccctctgctttatcatagaccgtctgatagctcgcgcttggggacgcattaattaggctaaagcccaagtccatccgccaagcccgcaactatctcatacaaagcccaagccccggggtctgggagttgctgacttgaggcatccccgacatacgttgctcggccgaacttggccttgagatgtcttgtttcctccgcctttttagcagccacatccactgctgacagaaaatcatttgttttcgaaaactcctcgctgaaagggagtaaaacgtccataacagtacggtctccttcccttgctcccgtgtgcgacttcagggttgtcgtcgcggacgccagagcagttgaatagaagtttggcgtattagggcagattccctcgagcgaattctttctcagggctgtataaagagcggaaagaagaactccaaaaattgcaccgagggttccacccatgtcgtcgacattctgcaacacagaccgaattacctctagcagatcgcctgaggctgtgcagcctttatcgacactttgcaggactgattcggccaagccttggactgcctcgccacagtctccatcgcccatgaccatgtcccactgggtcagccttggctctgctgcaatggctctttcgcacgaggtccttaaggctttctccaatagtaaagggtcaaatttgatgcgaggggaagcggtaatttggctgtttacctcggcatcgagatcatcgaaggtggtcttctgttgagaaggagagggacgggaggtgtttggccaagagacagcagtggtgggacaatcaaagtgccgtatcaaggtcgcgacagattgattcgattgccgagctgcggcggtaaggttgcagagagaaatcgaaaagcctggcgcgttgagagacgtttcaaatgaaccaaataatgttttgcaaggcctgatgttccatcgtgagcttaactgacattggatctcatcggtcagagcagataactcgaggacagagaggccaccatagttgttgaccagtaaaccaatttcatcgcgtggctcaaacttgacaaatgctcgctctgtatcggaatcatcgcaaaggaatttgagacactgctcaataagttgctcgacagggggggcgggggaaagatgaagttggccgggctcattatgtataccggcgccgacgacaaccacattgtctgggacggatgattgttggtgtctgcctggaacatggcaatggtcaagagccgaggcgatcgtaaccgtctgcccatttattgcttgtcccagtgcaagacactgtttgaaagagtaaccctccgaggcagctgccccgatgatcttcattgctacggcgtatccatcagcagccatcaaaccagggaacaagtaacaatcttactaaaaatatgaccaggtagccctctcctacccatgtggctatttttacttcttccaatggagacatcatctgtagcatgtagaatggcaatattttcaaccagaccttcagccttcgctctctcagccgcaaggccgaagtgaagacgatctccagtgtaatttgttatgagtagtatagtccctttcttcgatggcgccgttcgaatcgcagccaggatttgctttgcgcttggtgacgcaaagatatcaccgcacgcaacagctgatagcaggccatcaccaacatagccactccacgccggttcgtgtcctgagccgcctccgctgataatgctcacctttgagtcatcatgaaacgcattggaaactactctctctgtgtagttcaaactcaagtgatcgtttgcggagacaagagctcgcagcgctcttgggaccaaagaattggcgcttgttgaggggaagtagtgtttgtcggacatggtttgatgggtaaattattggtagggaaaggataaagcaatttacctctaaatacgtggttcgtaccatcttttaaagtgtccatcccgacttagtctctccatgtgactggcttcgccaagggttctccgagcttggtaattccgtgagtccaaatttgaagagagatcccggagtggagatagcggtgttcatattccgcacatgttccaccgtcgagtcgggaggcctaagttggtactgccgttggagtacatcacgagacgtcaaagtcctagcctaaaaaggaaatcccgcagaatattccgaaaatggctgatgaaactgaattcggcttttctcttcaccttcaaaatcattttcgaaaataagagattccttgatcatggaagttgatttagatttctcttacaagagttgtaacttgttgaaaaagtcatgttgtattaagtatcttttgtattgagttgatatacaaaagatacctaatggaactgtgctcgggatgtggggccgttcgatctagtagatccggtttgacgaaaagtccccgcctcgcggcccacaaagtttatcaatcaggtacggaggagatcgaggtctgtacctgcttcatcaaacaagtaggtgatcaccacaaatcctgggtttagctagaagcctagagctggtgcagtagaggcaaatgctgaaggatttcatttccttagattggatgaatggcaagtaaatgttacgtgataactaacttgatagactatgaaaagggtttattatgaatagaattactcctagactaatttacagtggtacagagtgtctaaccaggtaggtcgttcaagagatcaagacgcgttcaagttggcttgcacgagccaagcaagtcctagtaccaggattgaggtgactgggatagcaaggactcgcctagcagtgaaccaactctcattgatcttgctattcgcaagtctgatgctctgcggctttagggattcagcaaatctctcaatctatacacagttagcatatggctacagacctctgtcgaataggtattactaacctgttcgcatgcagtcttgatctccaagtaattgagatccttggggtcattcttctgttgaattcggtggacaaaatgacaaaagaccttgcacaccccctgaagacctgcaccagattcgacgacaagtccaatcgcctccctcttggtgattttgatatttcgttcgaagagagccgggttgcggaaacataactccagtgtagccatcgccatagattggggaatagcacaaaagctgaacacgctctgctcgcgcaagccagcaagatacgacaaacaatcagtcgtatgtctcagagcatccaacaccatctcagagctgcagttaagggccagctcgtgattgtcgggtttgaacaggtcttcgaaattctcgacgtgtttggaccaaatctctttcggccaaaattgtcgaccgtcatcattatcttcacggatatcgcgaatgatattgttcttttgcagtaagaggcccatggacttttgcaggtgagactgattgatcacatttgcatccgccagatcagcttcgacaaataggcgggttaggccctcgccgaccaagccagctacataccaacaatagaggtcgtactcttcaatcgtattgacggctatatctccaacagccgccttttccacgaaatcggccatgccattccccattttatcagtggtatccttgatgatcgcttgatagacaggtttcatttgtcggaattcagcaaccacgttatcgaactgcactaatagctcgcgatccttttcttcggggcggttgccggtgaaggtccagccatcctggtccaggacatctttgaagtttcgaaggagcggcacttttgtctcgagggggattgaagtatcgtcttcgatggtatccagaccacgtagtatcaagtagaacacacaaacgggcaaacgtagctcgggatgcagttccttgacaacgggactgtagctgcgaccggtttgatccaggaagtcgaaacagattttggttgaagactcctgctgtttatttctctcatggataggatggcgccgcagtttcctattaacggtcagtacccttcgaatgcagtgtttgtaaagatgttagagatggctatagacttaccattggattatcgtgcggagctggttcgggcgaagcacaaagtaaagaagatccgatatgagatccatagtagggagtgacagggtcttgttcggaaaactttttacagaaaatctagttaggggtcgattgttagttattgactcccaccaaaaacggcccggaaacggcccgctatcgccttcatcctttttgaagagaattatatgcaagaaacagacgtatctgtatctctccagtctccgaattgcaaatatcgatatcccctctgatcgccggtacttttgttccacgccatggcgtgtcttccggtaggcgtgcgttgacagttagtgggactggagcggcaaggccatcgtatgaattcggaaacaataccaaccagctgatcttcgtagtggtgaaaggtgttcgcagggaacaatctcgcggggcggcaaaagccagcaagagcgactggattcctgcctccagaatgattggatgaggtagagttgaagaacatagtccctcggcggctgtggtcgcgatggcagcgcaggaaatgtccaggtgctgctcagcagaaatcaaagctctaaaaagtccattatagctcagatatgactctgcgagtgaatcataaaattggtcaatattaacaggcctcagcctgcccggcctggtatttttgaacgaaggtaagatcaatcggtcgagtgaatctggcctgcaaagttcacgcgtaacaatattttggcgatagtgggtatgttgtgattcgcagctccgctgacttcaatattgaattctgtttcaacgccgtcgatgccttcaacatttggattgacaaggtcggcaacggacaatgagatatcaaactctaaggcgggtccttccagtattaccgattgctctagagtaacgtctgcgagctcgatgctgtttactttcttttcattacgcatatccatcgcaaccgcaagggccgagacgcaaatgatagatgcagggacaacggattgaccttgtatgcggtaatttttaagccatagaaaatcttctaatttgaagacgtgccgccacctcggcttcattccaatggtacttggaacgcggcctccatgtagcccttgaggtagtcctgtcataatcaagttctccaacggcagtggaaaggatttgaatcgcctccgaagtgaacgatgaatgagaagtcaatcctcgctaattgagcaatatattggtacttaatcctggatcaccgtctctccagtaaccagcggcttttcatatgtctctgaagccgattcgatatgaacagttcataagtacgatgggcatcgggtccgacacatcgccccggtccacgtccgaagagacccagagctgacatcgtaaattagagtctaacaccgaaatagaaactttgccgaaactcggatctggccgaaggactccacagccgaaatctataaagactcgtaatgtactagtatttcagccctggaggctacgaccgagaagatgtgctgtttgagaaagaagaaaaaagacccggtgacaagaagtaagaatgaatgttctgattgccaggttatgaaacctttgatatatctttcgtacaagagtggcccttgagtccaccaaaaaagaaagaaaagaaaaatgacgaatacgtttagaagtcttctccgcgagaaatcacttctttaacgttaggccgaagtagaattgtctgagttccgtcagtgagatgttcctctccagaaaagaagaaggggggtgacttgcgtgttcgaactgggccgaataggtcccctgtttctcattcagaggggggtaatcttcgacaattcccgatttcactagattattcaactgtcttttatgtcagtcaatagttccaatccaatccaatgttttgaaggcaattccatacaccaaggagatacttctcttgtccaattctgtccaaatagcgccggcagaaagggatagtgctgaaatttttcttgatagcacccaatacatttcttgccgaggacagagttagatccttcctttttgcgtcaccgcgtagagcataatgagagacttcacccccttcgacgcatcggccggcaccggtactaccaaatgtttcgatagcaaaaacatcgccttcttccatctttgtcatatcattggatttgacaaaagggacactcttagtcccatggattgagtaaggaaggattgtatggccgcacaagttacgaacggcctttatcggatgagtcttgccattgatttcacactcgtagctttccatagcctcttgtattaagccacccaattctccgactcgaacatcgataccggcttcccggacaccagtattagttgcatccttgacagctgctagtagattatcatagataggatcgaatgccattgtaaaggcactatccacaatccgaccgccaacgtggataccgatatcgaccttaagcacattgctttccttaagcactgtcttacagccagcgtttgggctataatgggcgacaatattgtcaatgttcagaccggtaggaaatcccataccagctattaaagagtcgccttcggtaaggccatcatgccctactaaacgtcgcgcactatcctcaatgccgttggcgatctctaggagtgtttgaccaggcttaatgcttctttgtgcccactgacggacctgacgatgtgcctcagctgcctggcgataatcggaaaggaaatcggaattcagattgtccaggtatcgcttctcctcgctggtagttcggtatcgattgtcgtccttgtactcgacctcttctcccttggggtaggtgttgttcgggaacagctgggagatgggaatcgatggaggatcggtctgagtctttggctgttttttgggcttcttctttttgttcttcttcttcttggcagcgctagcatcaacggctactgccggttgatcttcaccgtcatctgagttctctccttcccccgatatccggtttgctgcggcgcggttggaaacaggcatgtcggctgcattcgcagcagcgccttagcaatgaaaatagatgtcagcatatgttcccgctgactcccatgtgtcgactgaaatatattcttaccctgcccgctgtttaccagcttctccgaaagttctggcgggtcggttgtcatgtttagcactgggaggggggaagttggaactccaaggatgggaaaaatgctctccaaatttatctgccccagaacaaagacaagagcgcctacaatctgtcgggtgaaatcaaagttacggtttttaatactgtctcatacactagccaggtgactgaaagaaaaaaattcattcactcaactccaccgtggattatctcaggaatcccactcttccgtacagtacagtcacgcctgtatttattgattaatatgaaatacagtgctcggttgttaaaagacaagaaaaatactcgtttaaaaagatcagcgagatctagcaggagggtatatttagaatgaactttagttgtagatcgatgaactagacttattctgactattttatcagctactcccagacttgagttatttgtgttgaagtgtttcataatgccaagtccatagcaacaacatagccgtcttaccatcccaccctgggagccagggtgggtctgtcccataggatagtatctggtagcgaatttgtcactaagctagaaggctcggggggatagtatattgataatcctaagagcttccccctgggctacttagtcccgtaatagaccgagaatcttctcaggatcaaagggataaataccacgagacctaaaagatgatctaatagtccgttaggtaaagccctgctatcggattttatcaacttgccattgattccaagacgaaagccatcaagaatgctgattcctatgcatggtttgctaccgctatgtatctcgatcaatgtgactggtctcgaatgatctgcgctcagagcaccagcacttcaactgtcactaggcgatcgaacaacgaaacaaccactgatatgcctgttatgcgaaagacaaattggcgtacgctattcccccgtgtattggcaggattgcaaggtgatcggaagtaagcatgatttggtacctaggtatggtgatcactcgcaaagatgattcgaggcgctataagtcgatgttgaagctggagttcgttcacaaacttctcaggcgtacctgatgcagtgttataaaatgcgcgctggcttgatggatatgaagctttgttgatctgctcttaatatatctaccttcctacgagacgtttcctgggcttatttgatgtgcccgagtaatcttaaatcaagttaaaatgaggtcattcaagaggccatcggtcattttcagcacatttgaaggaaaactgtgaagcctgctctatcatttccttcctactacaggtcatcgcaatcaccttcgaggtctgctatattatgtggcgggcattccatcggttgagttggtagaggctctgacacgtagttttccggtacatagtgaacaatctccacaaattcaacatgccgcggttcatatccgatcatcccaagatcttccagccggccaaagaaatatgacatgatatccagaggtgttcttccgcctggatcatacctcactttttctttatagattcgttctccttccttgttgacaaatttgatgaagtaaacaaaccgcctggcagtttgtccctggtactcacaagtgccctctttccacatcacaggagtttgagccttgagcgccgccgagggatactcaacggggtcttcaccatcgatgtgccagcagggtaacacgctaaacttttcaagacaggaaatagtcgctggatccaagtctacagggaagtagattgtcaggacctcataaagcataggaggagacatcgggtgggctgctatgatgtgccccctatccgggagcaggcaggaaacttctcggctccataagcgagttgcaagagcttcctctaatcggagataaagttccgacgtacaaaactcttccctgtctctgctgcctctccactctagtatttgattaatttttggacatttaaaagacgatatagcaagcatctttcaaaccaatagtgtaatactgcgtaccgataatcaaccactcaatattcctcagctcctgcggacggcctcgggcgacaccggtgcactcttggagtttttgtatctcttggaggacggcaaaaatttcatcgctattgggaatgacaccattgcgtgcatctttgagcgatatccattctagaattcgacggttatcgggcattttggctggaaatggatctttggagttttttcttcattttcttgggattatttctcccggtgcgtccgtttgatcgagtggtgacaggcataggaccttggaatgaaagatgtaaatgtcaaagtgcaaggtcggactcttcttgtacgtagtggatctggtcgatagtattgctgaaacataaaatgtacatatattgcgggtaatatgttaacagtgttgaaagtacggttgctctcacgttgccgtacctatttgatgaccgcaaattagaaggatctattgttatgaattcaatacgtaaagataggacgtggacctcgggatgttccggtccattaccccccactccgttatacgcctttgtaatttaaacgggagacgtttgctctccgacagtccgatttaataaggctctagacttaactggtacataacgaaatatcagccttggagccaagtatgctggtatccacaggccaaggccactaggcatgcacgcttggacaaatctgtatattgtacaagataatttgctaatgacctcggcagcacgtatgtacccgtagcggattctcttgatagcccccaaatgctgcgccttcggccgacaagaaaacaggactgtgatgggcgagatttatctccgacagaggagtgtttcgcctcgtgtatccgacaccccacgcaggatgtattcactagtaatccatgaagttggaaacgaacgccacaatgctacggaggtccccaccagcacaccaagtccaatgacatatcatttcctgtctcttgatgtagaataggcgggtaaaaagtacgaagggtttgaagaggggtctatttgacctatggccgagtaagcttcaaagttataaaaatgtagcagctatatccatcaccgaaaagcgttagcttcctaagtttcggttttaaatcgcttgtacctctcttcctttgttcgatcaggctcgtcccattagtaggagtccgtactgtattgggcagaaccggaatcacgccggagtcacatcattcgccgaacgtgaaatgaacatgcttgtgcacgatctagtgcttgcccatctagcctgcgatcgctaccatggccagaagttacattgcaggagagagagtaacagcagcacttgcgtgcgatgtgctcgggctggtgttcgatgtaccccacgacaaatgaggttttccaacccactggagacaattcgatatgctccggatctgtacaaatctcctctgggttctcacagcttcacaataaacacggcatgctccagcggccttgtgggagtcgatgtagcctgtaaaagtctacgggcagggacattggctggcgccatgggtggcaggtgtcaatttatggctttccccagaacatactaaagaaaggggcaatacgcgcgcggcatactcaataagcggcaaatctcacaccttcgatgcaaaggcagatggttactgccgggccgaggcagtcaacgctgtgtacctcaagcatctatcagatgcagtgagggaaggtgatcccattcgtgtattgttcgcggcacagcaagtaacagtgacggatgaactcctgggatcaacagtcccagctctgaggctatgtagtctctcgccattttcatgcgggttttccttcgactgtctaaaaggccttctcgaatccgaaaagccaggtgctggcgttgcccatggcagttaagagttgagagtaccatactcaaagatcactagatgtataccaaagcgtcaagtcacagacaaatgaaagaggttaagaaatatgatgtcattgaaaaccatcgaacctacgcgataactattcacagacgaacgatcccgggtatgatcacaaaacgaatccagctaagtacaagacacgaaaacaaagtctatgcaggagacaacctggaagttccagctcacacatgtaactatttcttggacgacttccgtgatccaatacccagccggcccaggttcggaagactagacttgtgcttgtgagcagatggtccagccttcgtactgctctccaatacacgtccgacagtggtgccaccggcgccatgaccagaacccagcgctgaatttccaatagtgacgttactggcacccgaagcattgcgcggagtatcggacagactggcacggtgtctggggcggtctgcggcagccacggagagagcggctgtaagagaggggttgctcatagggccggactggtcgaaggagtgacgggtggggcccagggctgctcgacgggctcgttcctggacggacttgaatttgtcgaggagttcgacccagcggatggagttctcgtcgcgggttttcaggcgggtgcctgtagcacggtcgaatgacggggccgtttgtgtggtgctaggaaagttcgtctcagtaaactttgaggtagaatgcgaagaacagcagccatacctgcggattccgccgtggaggaaaccaatattgctaacgctgttcagacgattcttgagggcggcgaaggcggagctctgcgggaggagcatgaggacgccgtagagacatttgtacaggaaggggtatttttcgggttcaaggagttggaggcggagatctgttggggttagtctctggactaatgttgggttgatggaaagaaacggacatgtgaatacaggtgactcgagtagttgcaccagtttgtcgatttggattagcatattaactgtcatttccaattcggcactgtgatggttccgtcagcggatatcgtggtggatggagctggtatactgacaagacttggaggagattgtatgcctgctcataggcctgggcaagaagacagagagaaaacgtagagacagcattgtggcaccaggatctgaaaagcccaacaaagaacatttgaccatcctaaatatttcattaatctcaagacgtaggacagggtgtctgggtgtattactctggaatcgagatttcttaagcgctttcttaaatccgcgagttcgggcgctgtgatgaggttgttgttcaagttctgaaccatgatactagcaaattcaagatcctgatgatacattagcatataggaccccaaaatgtgcaagaaacatcacctcttctttctcgaggcattctgccaaagtccgatagatacgctccgggctcaggttcagagaaagctgcctgatgatcagatttccacgtacttccagtagatgtctgtcagtggagtagagctgcaacaggttgaccatgaaagaggtaaaatagctatcctcgctgtttcttgagatctgggaaaggagctgcagatctttggttacaactgcctctgaagggtcggatagtgtctttagcaaagctgggaaggtaccatcattgaaagcgacaaccttccgcggggctttacggtggagcataatgagccatacaagggccgcaactctagtggcttcattttcattgaggaattggagagtgagggagttgacggcagcggcgtaatcaaggtcgacgggaggaagcggcgtggaaacattgctactacgtggtggtgtagttgcaatggaattatcttgggctgtttgtttctttgtgtcaatgttcgctgtctctgaaggccggactccgggagtcgacgaccttcgctctatagtttctttgctggctgtagtgaaagggagttttgacgatggcgcctgggattcctcgcttgtatcatctgacaaggagtagatgtattggacaagggacgtattgacttggtttgctgcttttcgtacttgatctgagccactggacatggccggaagtacttgagtgagcagccgcggaacgaaaggaagaatatcttcagggctgatctcgaaaaaggcatcaatccaacgaagggccgtcaattgcatttcctcctctaaaccaacgtaagcatatgagaatcagaggggtaaagccactcttaccataggtggtattgacaaagccgacaagaatattaagaatcttggggtggtcgatctgtacatcttgtcccgggatccaatctccatctgcctgagcgagttcatcatcatcgagtgtcgaatccgaggccgagtcagcgacggcaaggtcaaatctgcggtcactggcgccatcggcctgggaattttgccccgtcgcattgctcatcgtatcgctggtgggcgactgtctgttgcttttctgacccttccggctttcctcaatccccttcttcagtcgggtaatcctcttgatctccgataagaaccgatcaagcaaaccttgggttgcaatattcacgtctttgttaggcccaccaaggaacttgatcaatccctccaagaactctggcaaatagctcacgagctccaggtcagggattgtatctagaagggtaagccacgagactagaaagttgcgagtgaacggttggatcacatgaatccgatctttaagcagaggaatgaatcgtgcaagagagaatgccatgggaagttcctgctcatcctgattctccaattctggagtatctttctcagagagctgtaggatcgacacatatgaggcggcagattcagctacgatatctttcaccaggcgatccagaagctccgcgccgttcttgactgatagctctgcatcggatgcaagctgtattgaatgtcagctgtgttacccgaattaaaccgatcgacacctctcaccttagccaacgcgtcgaaaacctcattgaagaacagcaatatctctcccttggctactttggctatgttatacatgctctcgcatgcatagtaccgcactcgtgcatcttgatcggagaagcatgcgagcacaggtggtacaatttcacccaagtatggcgcaactccttcctatatcccaggtatcagcgagtccttcaagtagttatagccaccccttaccgatcctagtgcaatcgaggccgcagccaatccgatcaggcctccattccgggcatggggttggtgcacggcgtatgcataatcgtggcagagctgctcaacgatcttttggattttctcctggtctccttggaaaacagcgtcacggacaatcttctcgagcctagtgtagatagacagcagtcagtgtgggttctttcaagtgcggagcggtgaaaccgagctgacatactccaaggctccctgtttcctcctgtcgtacagcttgtcattcaataaccgctggattgcttgatccattgtcaaagcagcctatgctgcaatctttccccagtatggtaggctaagcactgctcattgtgaatggaaggtatctcagcgcgtctgtttcgcgagacggtcgggagcttggaagttgggtgtggggggtaagtgtgatgataaggcgcacaagcacaaaagcccaaatcgtccggcagcttttcgatcgtggtcacaagtaaaatcctaatgaacaggtgagggagatgcgttggcagtgtggagatagagcggtggtgtgacgtaaggtctgcgcgctcgagccttaccgccttgggctttagctctagataagtcgtgcacctgcaggtgccggattcgtaagctgcgatggaattaaagcttttttatatgattatcttaggtgcggtatgcgtgatgaccataagcaagataaacggaatataagaacaaagaacccaccccagcttcggaacagggtcttgactacttggcgcccccttttagtatacaaaggcaaaaattgtgagctgtactcgtataaatatctaaaagacatccttaaatgtagatataatacccctgatatcatcttgggccaaatagatctaattactaaagtcgtatgttgtatggcgccaaggacagagacccgtgagcaccgactatttttgtactggtgacttgaataagaaaaatgtcaagagataaatgatttcaatcttagacgttgagtatatcaaagtccaagtagatgactatgaaacaagacgaagatgagaagcagcacatgaccaagcaggcatatcgcaggagatatcaagatctaaaatgagaaaccagatcccaacttttcgaacattgctccccgctaacacatagatatcataagactgagacgcaaaggggagtaaacaatcccagaaaagacaaaaaaaaaacaaacaaacagacagggtgactgtacaagaattcgtcgagactccgcggaagcatcacgcaaaggtatagaacagaagaaaaagtcttcagaaacgagagaacaagggtgaaaatgctaaagacaagtagaagaaaaagaacaccgataacacaaagaatcgctcaggcatgtcgactggaaatgttcttcatcgggatgcctgagactggccgctccatcctgatgggcgccagctagcagtggattgtttggatgagccggtactcgtgggcgagcttgggcccgtgtagacatattcgccgtcgacgtattgcgcacccgtggagaagttgctgcggtgcttgcgacgcgcatagcgctgttcgaggcggtagagttcgagttctgctttggtattagttatcccagtatttcaagatttcattgcatttcgcagtgacgtagcatcggttggatgttttttcgggagtcgcggaacgtactggcttgtagtttatcgaagagacccattgtgacggttgaagtgcaaaatgtagcaatggataggcttaagattgggtgttctgaaactggagagagtgtgaaggcgacgatcccacgtggtggaacgcggtggaacgtaacgcgagcggagttatgccggaggaaaaattgacgtctctgtgaagaacgggtcagtccctgacgatccacgttgacgtgtctgggtataaataagaggctgggcttactggataacgatagtggtttcggtaagcgccggtccaaggccgagacttgagataagcaggagtgagggaggtacagggtctatggctagcgggacagcggggttaaagaatgtcgagatttcaaatcaattgaatgagagtaaagagggatacgatttccccagaagtcatcaagagtccacgggtgtcgaggagaagaagagagccttgcagaaaagaaaaggggggtgtggggagactcgactaaattagcgcctcaatatccggagaggctagacaatgcgcatgtgtttcatgtagagatgttgatatctgcgtacggcgtattgatttggttgaaattggtagacgagtatgctgtagatagaatcgaggacagtgccatctaacctgcacctcaccaggtcgaatgtttctttttatagacaccacgcgacgttctcgatgtccagttcgcacagaccggtcgacccgctctatcacgacaatccggactaaactggatttgacaagtggagagagacgttatcttaggaagggatttaggcattgaaggggcatctcctaatctaataccacgtggtcgcaacgtctgtgctgtactccgtaaacggggggaacgggcctatctgaattattgagactagcatttcaataacagaaatataatgtggacttcaagcacatctcgccttcagattgcgaataaggcctgattgcgggtccagcaaacaacgaaggttacccgaattcgtttgtgtacttccgaatcctgtccgttggttttatttcaaggatggatacgtgtaaacagttgctgtgtggagctttgcagatattgtataatagcgtgtttgccgccgataactctccaagatatcaactaggcatgctgactaagtattcagctatcccatctgggcccttacatttgaagccttccatattttttagaagccaattcctcattcctgcctttgtaaattcatttcatatttggcgtggcaaagatctcggaacttccggaaagtgcgggtgcatccggaaaacagaagtgggttatgggtaacctgccatgtctaccatcaaccatcaaggttgacatcatggttgacacacagtggtattttggacggattacctctagaacaccatttatggggtcgtgtttctcaaaatgaggattcagtcgtctcttccgagatttcaggctttgttggaatcttaccactgcgataatcctacttttaatggtagttgtttatatagaccgtctggtttttattgtagcttcgagaagccgatttggatatttcaaatcaatggtgataacagtgataaccatatgcaacaatatctttgacctgaatgcacgcagcaccatacagctcacattcactccttcttagacattttctcgcccgaatctttcagttccatattgccaagttcctctccatccactatctggccgagttcattcggtagccggggtccaagatactgaccccttttagaaaagacatacagtgcgagtacagccgccgtcagaccaaccgacacgacagagacgtagttcatattctctttagtcaccggcatctcagtcgggaggaagcaaaggatgtcaagaagaatcacccatagcaccgagataagattgatggcaaacccaaatcgaccgagcgaaaagggccgctcaggcataatgtgccgaccacgccacaaaagaatagcctgcggcagggcacaggaagtttgcaggaagattacggcggcaccagccatcgcagaaaaggcggttgatgagccgaggaaaatcaggccgtatagctggtaaccggggttagaaatgaccaggctttatcacatgagatacttaccgaaacaacgatgctactcagacagagtgcattcagtggaatctgaaagttagggttgacgattgcccatttttcactaaatggaagcatgttatcacgtgagacagcccagatcgttctcgagcatgtggtgcctgaagtacaagatataagcaagtattcaaggataatcttccaaaaaggagtagactcaccattgccaacggtgcacccaaaaaagcagaacgcgaacaaagccaacagaacagacgaagctcccttagacccggtactttgatagtaaatctcgattaggggaacacccgatggcgaattcagaactgcgtccagatcggtaatggcattcatgcaagcggcagaaaagggaagcgcagtaaccaagcccataaggacgggatataggatgaccttaggcgtgtttcgagcagggtcatggatctcttcgcagacatgtgctccgcagtccgttccaagaaatgcgtacacggcgttactgatcgctagtaggaaggcgagcccatcacttttccaccctgttccatttgtggcatcgccgagtgtccacttaggagcggcgtggtttgttcgactgcaaacgaacagcgtgatcgttgttgcggtgagagtgacacatgcgacgaggactgccgataggttaaggtcgttagattgatattcaataggaagtagagcatggattgaccaacagttcaaacgattgtaaagaggaagaagctgtgagccccaggtattgagtgcgaccgagagccatactatgccaagatagacgagccattgttgccagttctggatctcatagtctggataccagagaaccacgatggacaggattagggatgcaatgaagttgcaggctgcaccgctggctagccaccaccccaaaatgctcaaccagccattcctgcacaatatgttagcatcaaccatctgataggtattggaagcacgaacatgtaagaagcaaaagctcgccaatctttagatgcaagacagaatgcccagtagtactgagcaccggcgactggataggccgatgctaattccgccacgccagccgacagaattgctgtcatgagagcagccactggaagagaccatatagtgccagcggccgaggcctcctgtaaagagataccgattgatgagccagtgccggaccaagtgcacgttagactgaaagagagggcaacaagactgaatgtggagaattgtcgcggcatcgcacgttgatatccgcgagcttcaagatcgatatcatcctggaactttggcgaatgcatagtggtggtatataccctgttatgaatcttttgtttactgaaaggcaacatggcacattccatgacttatatacttctgtaaatgcacaaaaaggaacagcctggcgaactcttcgcctttagtcatcgttatcttcactgctgtttctcaatcaaagcctgaacgttgaccccatgaagttgaacttcacaatctattccctccgctcccgataactcgatggacggataagagcctcgatatcgggtatggatgaggtctatgtaaacgattggccaacactttcacgcctttaccgcttgcttgctgattggtctgtttccaccaccttctttggacgtttctccaccctcagaccgtctgataacctcgtaatatccctagaacgcacttccccaccaattctgcgccattagcgccaggttatttgatatgatttcttccagtccactgtgccctctcaacctgccctgactatcattatgcccccaacagaagtcactcctttccccgcatctgggcgaattcttcctcggcggattgtcaagaggagaggaaccactcgtgagcgcacgggatgtctgacctgccgacaaaggtaaataatcgatctatattctccatctttgctctggtcgatgtatatatacttacttctcccagaaagaagagatgtgacctcggccaacctatatgcaaagaatgtgtgcgcttaaattataggtgtcagtgggaggaccctagagcgttcggcgacaaccataaagctgccccattgcagcaaatcgctcagatcaagaatgaccaaaatagcatgtttcgcctcctgcggaatcccgatcctatcctattctgggtcgatgcgcactccgattgtgcgagctcgtcgagtcgacgtcattttctccgctattacactcaaacttttagcattcttctcaccagtaacatggaaaataattgtttcttatctggtgggtctttggtgttgctccatactttcacacctagtggtgctgactccgtcttgatagcatttctccccatggccatgtatagcccgcccctcctgacctccttggtcgcttggtcttcttctcatttgtcattacgtgatgattcgttcctgcaagttgctactcagaatcggtgcttggctcttcgggatctccgacatgcacttgattccgatttagtcaatgtggagatcacccttgccatgtcgttggtcttgtgctcattggagagcataatggccgataacggcaatgcttggtatcttcatctcgttggcgctgccggggtcattgcctccaaactcaatacgccggagtcactaggaggctccgaacaaatttcggaacgcatgctacgacatttcgcagatgcgtatacgggccgctggctgctgcgcaacttcgcatatcgcgacattgtaatgtccgttgcgcaggaccggccgcccttgttgagctcccatcagcttctaacactggacgagccccagctgcctgattcacattttgggcttgcgtcggagatcttagagattctctcaatcaccagtacactcaaggggaaactgaagaatttgctctctgggccagcagttgcgggtgaatctaaccaggatggatccgatgatggccaacaggctatgcgaatcctcgaaatgatgcctgaatttgcctcgctcgaggctcgccttattgactggaagtgtcccttgtctgcggatatgtctttagcgctcttggctgagtcctatcgcagctcggctatgattcatttatatcgtgtcatgcgctgggcgtgtccggagcgacaagacgagcttttagcaatgactactggtcaggtcgccgcaattgtgagtagtgtttcacagatgccgacgcgtagtctaccggagtgtgcattgctctttcctctattccttgcagggggagaagccaccctagaatcacatattcagtctatccgacagcgaatgcttgatatgattaaatcccggttgtttcgcaacgtggaagtggcgctgtccgtcctggaaaaactatggcggctgagaatggtgggagaatcaatggaaccctctgtgcgaattgactggcttgatattgtacggcaggatgggatctatctttctttatcatgagagatttcatgaagtctatctccttggagcagcttttaatcatgttgtatgtataaaatgacacgagatctaccgcacaaactgatccgcaaagctggcgcccagaccaacctcctcgtagtgcttccgcgctgcctgaagcttgctgaagacatcctcaattcccaatgccttgccgtcaacatccacgtagatatacgcgcccgtcacgtggaacaaggtaatcatctcctgaaccccatcgggcacttccaaagtgtggatgtcgccggggggctcgaaggcatatccaccttcctcggcccaccaagggtgctcaagatagtgccatcgaccccgtagaacagtagcatggacgggtcctgtgtgtcggtggcgtgacaagattccgctcttcctgacgcgtaggatgttcacaaagtatccgtgggacacattgaagcataacggacgaaaccaaacatccttggcctgggggacccaaaaccgctcgtcacattccaagtcgagaacgccggtgactactaagtcgtcagggacactaggcagcttgggaccccgataagctgcggtggaaagatcgcccttctccattgtctgaacaaccggcattagttagctagtgtcacaggcgttttatgtaatcgactgtttaccttggacattttggctttgtgatgatatggtcttgatgtctattcggatatgtcggacctcgggagatccctaggtcttatatatacggactcgtcacggtacgtagtcgccaatcttccggcgttaagggcggcgaaaccaatggatacttcaactgcctccacgattgcactaaaatctacaatcttggaataacagggtgggcctgtgatgtggagtggtctttttctggcccgccttactgggaggttagactttcgactcggcgtcaacagcggctttttctagcgtcggtaaatgaagttagaatttgggctacaaggtgatgtgaagttccctcgttataaaaccaaataaattatcctgctatccaggggtttttctcaagctaaccgaattctctgatctctcactatttattcccttcgaaatggccaccgacgagttcgttgcacgttcccacatcctacaccgggcattctccgagcagcctgcgaagatagtgggcggtgatggtatcagtcttatcttagacaatggtgagaaagtgatcgatgctagttgtggtccatcggtatcttgtctaggtcacacccagcctgaggtttttgacgccattacgaatcacctcaaaaatgacatcgcctacgtttattccggctctccttacaccaatggcgcgacagaggagcttgctgatatcctcctcgctgagaagcccggcggtttatccaaggcaatttttgtcaattcgggtagcgaggcgacggacgcagcgctcaagctagcgatccaatactggcacgaacgtggccagcctcaacgcacacattttatctctcggaagcagagctaccatggtaacactatcggcgctctatgtgtctcgggccatgagtcgcgaagagaattttacaaggatttcatgtcatctaatgtgtcctttgtggacccttgctacgcctaccgcatgaagtgggagatggaatcgaacgaggacttcgcgcaacgcttagctcgtcaatttgaggatgaaatcatccgcgttggccccgaccgcgtcgcgggcttcatcgctgagactgtcagtggaaccactctcggctgtttgcccgccgtacctggttatttcaaagccatccgggatatttgcgacaaatatgaagttttgctgatcctggatgaagtatgaccccgtttcttcttccattaaggtgctaagcgctttcagttaagcgcaagacggtgattgactattttacagatcatttgcggcatgggcaaaaccggcactatgcacgcctgggagcaggagggtatacgtggtcccgatattcagaccatcggtaaggccctcggtgcaggatttgtcccgctctccggtgttttgctccatcagaagatattcgacgcgttgtctgcaggctctggtgggctcgcgcatggccacacattccaggtatattactatgggatgcacagttgatggctgaaactaaattggttgttaggcccaccccctggcgtgcgctgctgctatcgcagtacagaaaatcatcaagcgggataatttgatcgaacgagtggcggaaatgggccataaactcgaagcgcttctctacgaagagatcggccctcttccactggttggtgatatccgcggccggggtctattctgggctattgagtttgtgcttgacaagaactcaaagtctgctttcttgcctcgggacaacttctgtggcaaggttgtgaaggtcgctcttagtatgggtttaaatattctcggaaatttgggccacactggtgaataccaggttgatcacgttctggtctgtccggcctacactacgacagaagtggagctcgcgaatatcgtttcgctacttagatcttctattttggagacgactcggcaattcgtcgtggcggagcaacctaatgaaatccccaattgcaaagtcaatgtgaaggttgctgaggtcgggcttgtcgagatatgaacaagagtagctgttcttcttctacgagaaacatgaagaagtccattgccaatttccaagggttttcatttagataatattctacatgtatcctttttcgggtgtttcaatttatttagggaatgatccttatcatagggaatgataccaatctggggtagcaatatttgagtcataagtatgactgtaaacactggcattgggtcctacaggaaatgtgtacaatgtcccaaaactcattattcaggcaatttggttccaatattgtaagacagatgaaacccatttgtgaagggaatatcggtaagtccctctatttcaagcctatggttctcttgttctcctgcgacggtattgcattcggaggattccccgcatttgtcggaggaagagcttctttaggcttagagttttgctagataggtccactctcgcctatttgggctgaaactcgttcctgtatttccagtcgtattcaaacattgaaagcaaacaatgtcaatccagacaccacgccaggcaccgagctaggcgccgtatcatggacgtggacgtgagacgaagacgggcccgtagaggtgtataagaaggaaaatacgtgtgtagagtacgtcagctaaaatgaatagttagaatgtattttttttttacctatagaggatataaaacaatggcaaagcccagaatataaagtgatgatatgaagacctcgcaggcctaggctcaaaaataatgcatacagagtatctcctttaggtaggtgactcgatataataccccatttggcggtcagctatttttgggacgcggcagtttggtgtttgggagcctcaggcgaatgcgcgacgcgtcgacctcatcgcacttgcctcgcctcaaccttgggatcatcgtagagctaccaaagttggtgtatttgttttatctattttgggataaatgtaagtcctcatcttaatcgttttcaagtccatatgctgacatgcctggaaggtatcgacaacgcccggccggtggcgacgacagcgtcaagactcccttacaaccgaaatctgttaatactcagaactcgatcgaccgacttgtaaggccatttaagtgtccagggagtgcaacacctactcgcgcatctgagaaaccatcaagaaagagacgaaaggtcaactatgccaacgccgacgggagcgtggaagatggagcggagaagccatacacgaatgatgaccggctcgctttggaaacaagagaggccaacagattccccgcgtataaaccgagggacaaagatgtggcgttcaggtcacgatttcaggttccgttcattaacaaagccaccggcgaatacagttccggtcgggtggctccgacattggggatgcgacaaggcgcgacatttgtggtcaagccacttcatgaccccagtggagaatttgcgattgttctatacgaccctacagtagacgacatcgaggaacctgcgcccaaaaacccagaagcaccgacggaggatacaccaacattggatgagccaattatacataagagtctagcagacattctggggctcaaaaagaacgtggaggaaagaccaaaggtgcctgtcgtgattgatccgagactgtgcaaagtacttcggcctcatcaagtcgagggtgtgaaggtattgcgctccgagataagctgtgccatgggagaagagctgacactatgcttacgtatagttcctttatcgatgtgttactgggctggttgacaagaacgccaatggatgcatcatggcagacggcatgggacttggtaaaacggtaagattgaccaaccatgtttcataccttgcttctaacgaacacagcttcaatgcatcgcattgatgtggacgctactcaagcaggcccccgaggccggaagaactaccattcagaaatgtgtcattgcatgtccgtcaagtttagttggtaattgggccaacgaactgggtgagttatgcgtaccctacttcttattaacttgactgaccgtatcagtaaaatggcttggaaaggacgccaccacgccttttgcgatcgatggaaaggccacgaaggctgagttaataacacagattaagcaatgggccattgcgtcagggcgtggaattgtcaggcccgtccttattgtgtcctacgagacactccgtatgtatgcggacactttgaatgataccccgatcggacttcttctatgtgacgaaggtcatcgactaaaaaacaaggaaagcttgacatggactgctttgaataaacttaatgttactcgccgagtgattctttctggaacccctatccagaatgatctgtctgagtacttcgctcttcttcacttcgcgaacccgaaccttctcggctcccaggccgatttccggaagaggttcgaactaccgattctgcgaggccgggatgccgcaggcacagacgcagacaagaagctaggagatgaacgcttactggagctctctgggattgtcaacaagttcatcatccgccggacgaacgagctcctctccaaatacttacccgtcaagtatgagcatgttgtgttctgcaacatgtcacaattccagcgcggtctttacaaccatttcattaagagcccggagattcaaagccttcttcgcggcaaaggcagtcagccgctgaaagccattggtcttttgaaaaagctttgcaatcatccggatctgcttgatctagcgaacgaccttccaggatgcgagcacacgttccctgaggactattcaccacccgattctcgaggccgcgatagagaaataaagagttggtactctggcaaaatgatggtgctcgatcgcatgctagcccgaattcgacaagacaccaatgacaaaatcgtcctcatcagcaattacactcagaccttagatcttttcgagaggctttgccgggcgcggggttacggctcattgcgcctcgacggcagcatgaacattaagaagcgcacaaaactagtcgacaagttcaatgacccagagagtccggaatttatattcctcctaagtagtaaggctggcgggtgtggattgaatctaatcggcgccaatcggctggtactattcgatccagactggaacccagccgctgaccagcaagcgttggcacgagtgtggcgagacggacagaagaaagactgtttcatctaccggttcattgcaacaggctcgatcgaagagaagatcttccagcgccagtctcacaaacagtccctctcgtcatgtgtcgtggactctgcggaagatgtcgagcgtcatttctccctcgactccctgcgagaactcttccagttcaaaccagacactcggagtgacactcatgacacattcaaatgcaaacgctgccggcccgacggcttgcaatatatcaaggcccccgccatgctgtatggtgatactagttcgtggaaccattttgtcaatactggcgagaaggggccacttaatcaaatccaggatctgcttcttcgtcaagagagtggggagcaggatgtttcggctattttccagtacatcagtcactgatacacttatttggcatacttgggcaggttcggagttactacattattgggcacattgtatctttggagtgtattcatttgggaaggaacaatcatgaccatagaatgatttgatgttttgttgtatcatcctgccgaaaaatgataatatttttgcattcaagagcagtaggacttaggtacttagcaacgaagctcaaagtgctctatatatagccttgctgggccgtgcgcggcacttggacttgtaccgtgaaccaaagctggcgaggcagagttcaggcagatagatggagagaatgcagaccatcgaaggttaaatataaaaaagcgatctatacttcttatgtattctaccgggtctatattgtacatcttagggttataagccagcgtgtctactccccaccctctcttatatatttctatcgtctttctatatatcacactccaccgagaacatagaatcatagaatatagtcatcctcccctacagcgacgattctgtcatcccaaactaatttccgtgtaaccgagatgactatatatatatctggtaactacaggtgtaacatcatactatagggtacgatccgccgttatatgatcgcacatacaggtccaggacacacccccgctatttccagcttctatactgcgtagtgcatcaatgaaccaaaggcccgcaatcacttcaggatatggcccatctgcctcggcccgccccggggatgctctactggtatatattcaccggcacgtgatgggccaccccactatggaaatctggggagcttggaatcattaccgtttgtgtcaagaatcttcaatctggcccttggagctgacatctcatggccgcagacttctgggctggctacatcagcggggccattgggatcatcatcggcaatccccttgatctcatcaaagtccggctgcaggcgggacactcacatgcagatgcatcgcgggcacaattgagccgcttcgaaaaagcaagctctcttgttcgaggtccgtgccaccccgattcagcgataccgatagcaaaatcaattgaccatcgttacaggcgcggctgctccgatcctaggctatggagctctcaatgcgattctttttgttgcttacaaccgatcgctagcagcattggacgggtccgtaacggatcccaccaatcccgtgggggtctcggcttacaagatctggctggccggtgcggtaggcggactggctagctggaccatctcctcgccaacggagttcatcaaatgtcgggcacagctggatcgccggccagatgtctcgtcgtggacggtcgccaaggatattttccgaacgcgtggttggaggggtctctactttgggggcttgattactagcgccagagattcgattggctatggattctagtatggaaccaacacgccactcccggctaccccagtgtatcaatctaggagatctagtgctgacgtagcgcagtttttggtcctacgaactttgcaaacgatttatgacctcccacgatgagggttctcaccaggctgctttgaagattctgctttgcggtggcattgccggcgttgttacttggggctcggtgtttcctttggatatgatcaaaacacgactgcaggcacagacaattacggattatgcgcctgggactgagagccaatctctgttacgttcacagcgccagacgttgaattccttccagattgcgaaggaggtctatcatgtcgagggtatcaaggctttctatcgtggccttggagtctgcagtgtcagagcgttcattgtgaatgccgttcaggtatgttttctgctcgttgtcatgaactaaacaactgacatctgctagtgggcggcatatgaatggttgatgaagagctttaatcattcctgggatgcgcaagtgacaagccaggagcccatcgcgggcctgtaaccaccaccgaggttagaatatagaagatctaaaacacatcaacacagcagcagccaagctacgcagttaccggggtccgatttaggttagattctatttggtattgaggtatttatattggaattactcggtagtattgctagtaagggggtaaatttcgcccagatgttgtgttttcgccgatagtcggcagtttcgagtcacccgcaaaacggaagagcgaaaccccggcgagtatcggcaatataaaaaataattgcctcacgtgatactccaccgatatgcatgaggaaagtcatcagaatgagtctagatggattgtcctggaaacttttgtatgtcgatttgcgtacatcgattgctggaaagggtatcatggtcgcgtggcaaaggtttgatttttatcccggaaggcgaaggtcaagcttcgcttcactccttcatctcgtcagaattttcttcgcgcttgccgttgtcgatgagacctagtccgatcgcacgctcggcaagcaattggctgtgaggctcatcgcgcaggatgcgaagtctaagggtagctagttagcgatgggatatatcatataagacaatgtgcgtcgggcactcacctccgcttgtggttctttcctcgggcgtgcgccttgaggttgtagtcactctcaaaccatttggcgcactctgtgcagtagaacttgcctaggccaggcaggtcctccacatccttcgagtccttgtacttctggaggtgacggggagttttgatatccgcgacgacttgatcgtagtctctgtgggtgggttagccaaaaataggtacacggacaacccctatgccagacgtaccttgtgcggcgcttgttcttgactttcctgagagcacccattgtcacggatagccgaaatatctcggagctggagccgagcagtatcaaaatagatgcaagggaatgaaaattggttatcaccgatttccggagtgaacgaggtgcaaagcgggtcaagagaggcttcgaacaacaaaagcgagtgttcgagacgaaatttccgccgattgtgggtcctggccagcgattgaaatgcacggccgctgattggctggcgatcagagacggcaccttgatgggcgatgtgggattgccgttcggctcacctcggcttagttgatttcgtcaccgtacatcgctgtatttaatgacgtttgcatgaggtatgtggtttgcgatatgtaattcgagtctacgggttgaatggctacttgaatatctacatagataacgtagatctaggtgtcggatatactataggatctgaagtcctgtccaggtaaatctattaatatagcactatatcgtggcatcatcgactagtaaacagatgttgatcattggcgggcctcatccctatgaaacccatcaaatccacatgtacgtcaagctatcttttgacggatagcacggggtacaggccggaagagttacctgaaggcacattgaccattccagagccctttggtccgaaatgggagagctgggcgaaaggggccatgtaattggaaactcgctgattggtggccgagttatacccgtcacatgccttgtatcgagattacggtcccggtacatccccaggcaaacacacaggccacgaaggttgaatatgagaacttcacatagggaagacaatatggagagaaaaaagatcggctatacatcctacgtatgagctattgtctagggtagtaaatcctgaaaaaaatccagccaaatctcgagatctctcggctattagcagcctctatcaaattgcccagcccgtcttgccgtcgcatgcggcaggcttactttagtacaataccaacgtatcgtatcgccgtggtaacagcggttacggctctactcccggtccccgtagaacctttctcccactcaaaaccaagctttaatcctcttcttccttttgatctcttcttttctcatactactctccactctcatagtttggtgaatagctcttggatgtgcaatcccatctcgtagagcttccatcatgatttctacacgcctcgcgcgcgctggtgcgctggtacgtcttccctccctcagctccagcttattattgccacatggcaataatcctgagtgccagtcgattcttgatagatggataactaacttgtcttgaatataggcccctaagttccgtcttgtaagcaacgaccttgtttccaggcttccaaaacatgtcgcatggcacttttgctggcgtgcatgatagctcggacatagctacacctgcagttactgacttttcaatgtttagatgactggaagccgggccttcgctactaccgttgaccccctcgaccagaaggttgagatgaccaaccacgaacatgtgagtggctgccagcctagcgcccagaacccggcgtggagtacgattccaagcaatagcgactaacctatttcatattagggtcactacatcaactacaagaagatgtccgagaacctcgccatcgtccgttcccgtctgcagcgccctctcactttctccgagaaggtcctgtactctcacttggacgacccccacggccaggacatcgagcgtggtgtctcttacctcaagctgcgccccgatcgtgttgcttgccaggatgccaccgcccagatggccattctgcagttcatgtccgccaacatggagcgtgtccagacccccaccaccgtccactgtgatcacttgattgaggcccaggttggaggtgagaaggatcttgcccgtgccaacgacatcaacaaggaggtctacgacttccttgcctccgctaccgccaagtacaacattggtttctggcgccccggctccggtatcattcaccagatcgttcttgagaactacgctttccccggtgctctgatcatcggtaccgactcccacacccccaacgctggtggtctcggttgcgccgctatcggtgtcggtggtgctgatgccgtcgacgttatggctggtctcccctgggagttgaaggcccccaaggtcattggtgtccgtctcactggtaagatgtccggctggaccacccccaaggatatcatccttaaggtcgctggtctcctcaccgtcaagggtggtaccggtgccatcatcgagtaccacggtcccggtgttgactccctgtcctgcactggtatgggtaccatctgtaacatgggtgccgagattggtgctactacctccatcttccccttcaacgaccgcatgtacgactacttgaaggccaccaagcgtcagcacattggtgacttctctcgccagtacgctgagtcgctccgcaccgatcccgatgccaagtacgaccagctcgttgagatcaacctcgatgagctcgagccctacatcaacggtcccttcactcccgatcttgccacccccatctccgacttcaagaacgctgtcaaggccaacaagtggcccgaagagctcaaggtcggtctgatcggttcttgcaccaactcctcctacgaggatatgtcccgcgctgcttccatcgcccaggacgccattgaccacggtgtcaaggccaagtctctgttcaccgtcacccccggttccgagcagattcgcgccaccatcgcccgtgatggtcagctcgagaccctcgaggagttcggcggtgtcatcctcgccaacgcctgcggaccttgcattggtcagtgggaccgcaaggacgtgaagaagggtgaggccaactctattatctcctcttacaaccgtaacttcactggccgtaacgatgccaaccccgccacccacgcgttcgttgcgtctcccgatctggtcgtcgccatgaccattgccggtactctcaacttcaaccccctcaccgacaccctcaaggacaagaacggcaaggagttcaagctcaaggctccctccggtgacggtcttcccagccgcggctacgatgctggccgtgacacctaccaggctccccccgccgatcgctcccaggtcaccgtcaatgtctcccctacctccgatcgtctccagattctcgctggcttcgctaagtgggatggcaaggatgccctcgacatgcccatcctgatcaagtgtaagggtaagaccaccactgatcacatctccatggctggcccttggttgaagtaccgtggccacttggacaacatctccaacaacatgttgattggtgccaccaacgccgagaacggtgaggccaacaaggtcaagaactgcttcaccaagaagtacggcgccgtccccgccactgcccgtgactacaaggctcgtggcgtcaagtgggttgtcgtcggtgactggaactacggtgagggatcttcccgtgagcatgccgctctcgagccccgccacctcggtggtctcgccatcatctgccgttccttcgctcgtatccacgagaccaacttgaagaagcagggtatgcttcctctcaccttcgtcgaccccgccgactacgagaagatcggacccgaggacaaggtcgacctcctctgcactgagctcgccgttggcaagcccatcactttccgtattcaccccaaggacggtggcgccgctttcgacattcccctccagcacaccttcaacgagtcccagttggagtggttccgtgacggctctgccctcaacaccatggcccgcaaggctgctcaggcttaaatgcgcttctggtgtcgtgactccccaaccttaaaaccttcaagtgtttcggttatcgccgagacacctgtgtaaactacgttctcttgtgtgttgaacaattcagatacatgcttcttgaaaaccacggtgtcacacggcagctattggattagttggctattgcccgtgttctcttttcaagagcaggatacgaggagttgcgctctgggaaaaattatgatgaacttgtgtgtttttgtaggcctgtttttctcggccttgcgttgattcccgatatctgggtgggctcaatggatataactcttttgatttttacatcactgtctttgtatgttagaaatggcatacatacacaatttccttttgtttttttcaactggttcctttcatagatcgtagatgtctatacaaagtatctcaaccgtggtccgtcatagtagacagccatgaatgtcccagagtaatccacttgacacctcggaggctcggacacatccaaggctgagataagctaccgaggctcagtttctgccccgcgtcggttggacttcagtataagattgacctggacgccatcagactgtcttattccgtcattggttcgaatttagtactttgatattttcaagtccacctctacatctcattgcaaacctatactatcgaataagcctagagcatcttgcatgataagccacccatcagttgaatgctgatctgcacttcaggacagatataaagatcgggttgttgagaatcctcccttccatctactatctccgcctcattccaaaatatggcgacccagctcgtccagcttccagaagtggagcgccttagcgcctcagtcgtgaggattttaggcgggaatccggggaaggtgagtgcatagatgccatcaagtcagtataccacagcaagctgatcgatagcaccaacgcaatacagttcacactccaaggtaagcatctcactccctcccaaaacccagaagaaaacacctaaccataagccaggcacaaacacatacttaattggtcgcggccataagcgaatcttaatagacacaggcgaaggcaagcccacatgggcagcaaaccttcagtccgtgctctcagaagaaaatgcaatagtgcaccaggctctgctgacacactggcacggcgaccatgtcagcgggctgccagatctgctcagaatctgtccccaggctcagatcttcaaaaaccagcctgattccactcagacggatatccaggagggccaggtgttctccgtcgaaggtgctactttgacagcattccatacgcctggacatacggttgaccatatggtatttatgctcgaggaggagaatgctatgattacgggtgatagtaagtgcggctcttcaatccaacccttcgatgaaaatgatatacaatgtccctcgaaatatctaacccaaatctacagacgtcctaggccacggtacatccgtcttcgaggatctcaaaacctacctcagcagtctgcaccggatgcgcgaccgcgtcgcctcaggccggggataccccggacacggggcggtgatcgagaacgccggtgcgcggatcaccgagtacatcaagcaccgtcagcagcgggaagacgaggtcctgcgcgtgctgcgattcggtaagcttgatgtcgcggatggcgagtcggcgccggagcacaagcaggcgtggacgcctattgagttggtcaagcgtatttatcgggacgttcctgagaatttgcatttaccggcttcgcatggtgtgtcgcaggtgctgttgaagcttgaggatgaggggcggacggttcatgattcggactctgggaaatggagtcttgtgagtgagaagtcggccttgtagttgtatagctatatagttttattcgctatagaaccgaaatgggatctaactagatacgttttgtcttagaataacattcgacgtcagcactcggtcactcgtcttcctggctaggccatgttgtacaaagtcagaatgaccaaaagacgaagaatttactgtcgaaaaatatctcttttgaatcgcatagaaattatagcacgatatccccttccctttatatatttccctgcagtccatgtgagtgatagaggcccaccggtagttccaacaattccaggagtgacgttcactttccggtcccccgctttgccctcacctttcaccttttttctctccctccacacactcgccatatcttgtttggtattactgctagcaggtattcacctatggagatagattgctagtttggtgctcatccggagtcaatatccacttgttccaaaggttggttcgcattcgtcatgatctccaagggtttccccgcctccaaaaccgactctaatcgcatgttcgctcgaaactacagggtccactttgcttcgactacaacttacagcccttattctaatccaaataatcccatcctctgctttcgcccggcatccgatccatcaccatgccttccgtcgagcccaagcatgaagctcgcctgcttctggtctcaaaccgtctgccgatcacaatcaagcggtctgatgatggaaaatacgatttttcaatgtcctccggaggcctggtcagtggtttgagtggtctctcaaaatcaaccaccttccagtggtacggctggcccggtctggaggttcccgaggacgagatccccgtcgtgacacagcgcctcaaggatgagtacggcgctgtaccagttttcattgatgatgagctggcagatagacactacaatgggttctccagtcagttactcctgctccccgcaagcccttggaatgtacactgatattcgttcttccggatagactccattctctggcctttgttccattaccaccctggcgagatcaccttcgacgagtccgcctgggaagcttacaaggaagcgaaccgtcttttcgcaaaggctatcgcgaaggaagtacaggatggcgacttgatttgggtgcatgactaccacttgatgttgcttccggagatgctgcgcgaggagatcggcgatagcaagaagaacgtgaagatcgggttcttcttacatacaccgttccctagcagtgagatctaccggatcctccccgtgcggaatgaactgctcttgggtgtcctgcattgcgacctgatcggcttccacacttatgattacacgcgccatttcctaagcagttgctcgcgtctactgttagtataccctacgcggcttgatgttcatatctaaccggaattagtggtcttgcaactacgcctaatggtattgagttccagggcaagattatcacatgtggagctttccccatcggtattgaccccgagaagttcaaggaaggtctgaagaaggagaaggtccagaagcgtattgctatgttagagcagaagttccagggtgtgaagttgatggtcggcgtcgaccgtcttgattacatcaagggcgtgccccaaaagttgcacgcgctcgaagtgttcctcagcgatcacccagaatgggttgggaaggtcgtgcttgtacaagttgccgttcccagccgacaggatgtcgaggagtaccagaatttgagggccgtagtgaacgaactggtgggtcggattaatggaaagttcggtacgtatttccctttggtgttctgaacgaggctaatcgtctttcaaggcacggtcgagttccagcctatccacttcctgcacaagtccgtcaacttcgacgaactcatcgctctctatgccgtgtcggatgcctgcattgtctcatctacccgtgacggcatgaacctggtggcctacgagtacatcgccacccagcagaagcgccatggagtgttggtgctttctgaattcgccggagcagcccagagtctgaacggtagtattattgtgaacccttggaacaccgaagaactggcaggcgcctaccaagaagccgtgaccatgagcgacgaacacagggctctcaattttgccaagttggacagatacgtgtccaagtacactaggtacgtcaccctatccctgccaagcagccatcctgtatctttcgtatctcgtatttggttcccgactgaccattctctagcgcattctggggccaatccttcgtcaccgaactcaagcggatatcagcccactctgccgataagttccaatccaagaaattggcggaaacggatccgagcgaaagacatgtgccaccccaaacgcacgcgtaataatctttttatgtttctcttccgagacatgttgttcccagtttcctggtgctctgctgtcggaacgggtatttcaaatgaaactagatggccttcacgaacatggatgaggcgaaatgtattttcttagaggttgtttggttctgcttctatttttgtcttcttaaatctgaattctgtatacaggttttccttctagaccagacttatacagagaacatatcccgggttaatgtatcttccgggtcggcgggagatctgggcagaatagaatatccccatacaacatatggccgtgatgaaggacatctattatgagcaaacgaatcagactgggttgtccctggggaagtttcttaaggctttaggctgtaactcgcatgctgttacactcttgccttttcccccatagagctgcctcatacttggtgagctaggcgagatcaatctttgatgtaatcagactattttacttgagcctggtcataaattgcttattgtgcaaagtgatactcaggaggtcagtcacgtgcatattctgacagctcattccagccctggaggatacatgtactcactaaacactccaatcagtgagcaattctgatcactcacctgccctaatagaaggccctgttttgttttgatcgtcttgtattgttaattaggatgactttagttcggcaatcatttcggaaaattaccccccctggatatttgttttgtccaagacggtccttctctcaagccatctccctcccatcacccatagaggaggaacaatgtcctacttacaatcctaagaaatattatcccgctcgcattggggagaccgttggtcggtatcgcatcgtttcgaagctcggctggggtgctagttgcacggcttggctggcacaagatgtttctcggttagtcgaacaattagttctcagtgccatatcttttctaaaaccgcgaagttggcgatttcagtcgccccgatacgtaaccttgaagatcacaaatctcggagaaggggaaaagaaagccacggaagaagagatagcaatctcgcagcatattgctgccttgaagtctgataatgaagctatacgatacgtccggttgatcaaagagtcgtttttggtgcaagggtctcacgggcaacatatttgcttggtattcgaaccattacgagagcccatttggtttcttggaagacaccctgggagagtcggcatgcctccaaacattgtcaaggcatttttgcggatcttacttcaaggtctagactttctccactccgagtgtcatgttatacacactggtgattcactaactgtcttcctaaaaatcgtgttgactttctaactggccgcagacctgaaagctgataacttccttattggctttgaacacgctaatgttatccaacgatatgtccgccagcaagagctcgatcccgcaccgcatgtatttcggaatggacggcttgtatatcattctagaccagactttgggccactgacgaagggggtgtgtttaataaagatctgtgacttcagcgctgccgtcttcggtgatgtgacaacaccacacaaccatgacatccagcctataccattctgcgcacccgaggtccttttaaaggccggttggacttatagcgctgatatatggaacttgggaacagtggtaaatagccaagagtgagagagacctatcgcatattggtgatacaacactctttggtgcaggcgcacagcattccctggaggcgcacgttgcgcaaatgataagacttctaggtccgcctccctcgcaattcctgaagacatgtgatccatctatatgtggtcgtttgttctcagcccagggtatgtttttgccatattccgagatatgatggactctgatttactcgcatgtgtaggggacttcaaatttcctgatctgattccacccgaaagcttcaatttctcgaatgtggtacctgctgtcctcgaaggggaagataaacgtctttttattgagttcgttcgcaagatgcttcaatgggaacctgaatgtcggttgactgcaaaggaactttatgatgacccttggcttcataagttgtagtgacaagggggtcacagctatcttgtgtacaatttgtctctggctttttagggcaaggtttattatttacttcaaatcaaatacgaggcaagccgattgggcactatgtggcattaactaactaccctgcacaatacatagctggccattcaagatatcagtaagccctactctgcccgccagcatattggctgtgggtaagtcaatctgatctggtgcatataactagctcatcatgcatgctgatcaccaagcagttcattatcccaccgcccaaatctcgaaatcccgttctgaacttctcacgacaccaaaagctgtagactaccaactatgccagaaactttccgtttctggactttttgtgtctccgaatgttccgctgctgctgcgatcgatgtcggtctctgcgaacgctgtaagcagcatttttgcgccattcacgccatcttagcaacccattgttgcaaggtacccgcatcatgtaaactccgactatctgaggcgttctaatccgaccctagaaataccctcttgacgaagatgaatgggcggctgcacaaacagaagaagtaacagcccttcgacacatgatgaacgacgaaatccttcggcgtcgagcttccgaacgcaacggaggcctcaattgtgaatttgatccctcagaccctctaggacagaagcggatgtgcggcatgcatatccatcttcgaatcatttttagcaatggaacggcctggcttgctcgaatactgcggcataactacacctcattctcagacgactttagcaatctctgcttaaagagtgaatgtgctactctgaaatggctcgaagatattaacgtgccgtcgccgaaactttacgacttcggtctgcggaacgaacccgagaataaggttggagttgcgtatatgctgatagaggaactccctgggacacctttacttctccctagcccgtcggaggagcagttgcgaaaactgtacaagagttacgccgacatcttgtgcactatctataagtaccccattgaccaaatcggtgctctctctttacaaccagattgtactatctgcataggccccatcgtgggcgatcgctcgggtacattttcgcagataggacctttcagcaatgcacgagaatactacacgacatgggcagagaaatatctcgagatgatctgcgaccaccagcttttcactccgtactctgtcaatgcctacttaatcttcaaatacctcaaggaactggcgcaacaaggacagtggaatgcgtttgaatcgagtatcgacaatggccccttcttctcagaacacatggatgataaaagtgaccatatacttgtcgataaggattacaatgtcactggggttatcgactggacgtttgctagggcagtgccgatgtatgcggcatttggtccttcactgttgacagcagatatgaacgatatttaccaaggcaaggctgggcatccccgggtgacagaatcctggccgaggctatacagactagggacaagtatttggctcgctttgtcggtggccctgacctggttcgccgcttctcctttgctctcggaatgggcatgtgtatgtcttgggatgaagcagttgatttgttccgaggcctcatatctacggctgaaggtatcggctcggagtttgactgggatgtctggcgtcaaaatcgtatagctcaatgggctggtgatgggaggttgcaagcccttctgcttgaattgggagaaatctagaatctcgatatttgaccgaattgagtgagtagcagcaagatcacaaaaatttgattctgattgtcgtgatggtccacaagagatatctatgagagccgaactccgtcgtattagatattttaaagacttgcaaataatcagaagtgtacatacaatttctgaaataaaatatgaaggtttgctatcaaattgccctgtcagtcgacccatggatgtcttatactatggtgcaaacagtgcaaacatgcttccccgagaaattctcgaaatcctcaactgcaaacacctcaagctcgcaaccatttgggcggtcaccatcaccaaccacctgcttgaccacctctaattactcgtcctctccaattccacccaactacaattggaagagcaaccgcctgctcccccaccaacaatggcaccaagccatctcctccgggcaacaatgcctctccgagcctcaatcacgacacctctgtccctgtcacgcccctcaattctccaatcaatcacatacctcaccacgcccctccgcaatgcctcaacaactaccccaacccctacacagccgacgaccaccgggacagaaacaaaagcgccctcccgactgcgcaaatacgcctcagccctgaagaccggcaccgtagtctccgtcggccgcatggaccgcacagtgggcgtcagccaccgccacaccctctgggaccgacacatccgcaagttctaccctcaggaaacgcactacctagtgtccgatccccgcaactcgctccgcaacggcgacataatcgagttctcgtccggcgcgccgaagagccgaaacgtgcaccacgtcgtcgagcgcatcatcacgcctttcggcgatgcgatcgcagaccgtcctcctgtgctgtcgaaggaggagcgcgaggctgagcgtgagacgcgctgggcggctaagtatctgcgtcgtgagtcgagacggcttggtcgcgaggtggatcttgtggaggaggccgctaaggcgggtgttccggtgcctaagggtgaggtgctttctactgcgcagctgattcatcgcattcatgcggagaatgagcgcgtcgggaaggttaagaagcttgtgcaggagagactggcggaggctgagagggttggacaggagagtgtgaaggaggctaagcaatgagcagttggcttctactgagaagtgtacgtttagctctttttgggacggacttcagtatctgaattgccggatttgtccttcggcctctgtggtgttgcatatcggaggtcatgtactgtattataccgcttcaatctattttcattggcattgtgatatgctgtattcctggggtggattttccaactaaaaaactaaagataggctgaagtatgtatgagaagaaggagagccatcaacatcaaaaaaccaaaaaaccaacaatggacatcgtaaacatgggtttagcctagacggaaccgtctattccaatccctaatcatttggaaacaaaaaaagaaagtcactggtatcatggaagaataaccaactcctttacccagaaacggcaaactatgcccgccaaatcccgaacccaccccggcaagagacgcagtgctccccctagcattgggtgttgcacggcctcatcttatttccattgctcgctcgaacatcatgccgcccagacccggaccttgagatcaacactgccagtggccagaacacatcgaatggacatctttgtcgcattagggtcttccttcgccccattagacgcagccggggcaccgttcgtaccctcctttgcaccggcatccttgagcaaaggcggtgcccaccggagcgaactgataaagtggtcgtgggccgcgatcgtacgcacacacttgcattcttgcgtgagatcccagcaccgcatggtcttgtcgtcagataccgagagaaggtatttcccgccaggatggaagaccaatgagcggacccagttgtcgtgaccaacaagggttttgatgcagtttccgcgggtatcccagagacggatagtcttatcgcgagaaccagtagccacaaactcggcggacgatgatgctggcggtggtttctttagccccgcaagagctgcgaagtgagggtagcttgttgccggagcgaaggctacacactcgatataatgttcatggcccaggaatgttgacttggtatcaccagacgagatatcccacagacgtgcgactcgatcgtctccaccggagaagaggaaccggccgtctggggatggtgtaacatctcgaatccagtctccatgtccctgcatggatttgacacagtatccagttgtgacgtcccaaatgcgcagtgtgagatcgcgagaagccgagactagcaggtttcctgacatgggagaccctgcagctccggatggaatgaaccgaattgctgaaacactgtggtcgtgtcctggtagggttcggatgttcttatactcgtcagccgggtcccacaatttgatcgttagatctgacgagcatgatgcaagaagtgtgcctccacgcggtccaccataatcgacgtctaacactgccctggtatgtcctttgattgtgcgctctagttcacccagctcccaatcccagatcttgattgtggtatcatcggaaccggaggccagtgaagagaatactggatggaaagcgaggcacgatactggcgagcggtgtgattggaggtcatgacgcgctggtgctcgaggcagccaggtaacggggtcttggtttttgcgattcagcgaagtcggggttgcggtatccagctcggactggagtgcagcgcatcgtgcttccagttccatgatctataccaccattgcaggttaaaaagatgtagacgtgttggtatgcccggtcgtcgcacctttttctgtaaccggactacactcgtccatttcttctccaacaggccttcatatttctttagtgtgctctcgtcgaccctgatcgagtcgcccagttcttctcgtaaagcggcggagctgtggtgcaaattcacagaggtaaggtaggcgatcattcctttatgtctgtcgcaaaacaccatcagcgatcacccctaaaggaaacagatcgggtcacatacagctcctccgcctgccgcgttgtgagaagttggctcatgatgttatatgtgctctctgttctctctgctcatccaaatgcgcatataccaagttggttcggaaaactgcgatggagggggagtggtgtgagcggtgtcgaggggagtcggggggagttagagggaggttagaagttggcaattgaagaattgatccaagagaagtaagagaaaccgaagaatagagagaaagagaagaagagaagataaatatgaagggcacgttgtgatccaccgcggggaggggagaacaaaacaatcttcgccaaggcttttgtttactttcctccaacttcaactgttgattttctttaactcctgttggtttcgactattatcagccactcctttcaatatacaatttggcactttgactgagatattcatgttctggtcaagatcagtgtcttattaaagcaagacaagtccgtctttgataccctttgggcatcaacccaacacagtacgaccatctgaaccccccgagacaccccggaagagcccccgcaacaccaactcagagcctttatatctgtccccggaactctctttgatactatgcgcacttctgctcagataccgcagaacgtgctgactcctttttttcctagaatccgttgataattcccgcccgtcgttagaatggctgaagtcccagaggatttctcctccttacccttgcccgaccggttcactcataaggtgcgctcatccctgcataactagcccgaccgataggattacggaaatctgactccgatgcacagaactggaaagttcgaaaggagggatacgaagatgcgaaagcgcaatttgaaaagacccccgatgaatcagatccgattttcggaccattcatacaagatcccggcttatggaaaggggcggttgcagattccaatgtcgcggcacagtctgaaggtctggcagcatactgcgcgtttttgaagttcggaggagtccaggcctgtacgaggtgcgtcaaccccgatcccagtcgcgacgcctgaacccgctgacaacattcccatttacaggagccgcacgtatacaattggtcctattgctgagaagggtctcccatctacacgaccggccggtaaagcctgcgcgcaagaagctattttattatgtgtcgaattagacaaggccgatccagtgatcgaggagctactacctatgctatcacacaaagtacctaaggtggtcgccggatctctcgcagttttcaccctcatttatcacaacttcggctgcaagattgtcgatccgaagcaaactttgaaggcgctgaccaaggtttttggtcaccctgataagaatgtccgcgcggaagcacaaaacctgaccgtggaactctatcgctggcttcgggaggccataaagcctctgttctgggccgatttgaaacctgtgcaacagggagatttagagaaactattcgaaactgtgaagcaagaccccacgccgaagcaggagcgattcacccgggcacaacaagatgccatggctgcggccagcgctgcaccggcgggtgaggagggtgaagtaccaactggggacgaatttgatgaggaggaggatgtagtggttgttgatgctttcgacctggcggaaccggttgatgttatcaagaaagtaccggaaaacttccatgatcaattggcctcgtcaaaatggaaggaccgcaaggaagcgttggacgctctctataatgtgcttaatgttccccgaatcaaagatggtccctacgatgagatcgtgagggggttagccaaatctatgaaggacgccaacgtcgctgtcgccacgatagctgcgaactgtgtggacgtgttggccaggggcctgcgcaacggatttaccaaataccgaagcaccattatgtcgcccatgttggaacgtctgaaagaaaagaagacgactgtcgcagatgctttgggtcaggcgttggatgctgttttcagcacgtcgacccttacagactgcttggaagaaatcctcgagtacctcaagcacaagaacccacaggtcaaacaggagactgttaagttcttggttcgttgcctgcgtacaacccgcacggtaccagccaaggcagaacagaaagcgatcgccgatgctggtacaaagctattgaccgagtcagccccggcaatccgcgaaggagctgctgaaattctgggtacattaatgaagatcctgggtgaacgggctatgaatccgtatctcgatggactggacgagattcgcaaaaccaaaatcaaagagtacttcggaaccgctgaagtcaaggccaaggagcgacccaagcctattgtggcacctccaaagcctgctgccccggctggcaggaaggtcgttggcaagaagccggcaacggggctgaaaaaattagcccctgtagctgctccacctgccccagaagaacccccggccaggccagcagccagaggcgtcccttcaaagctcggtgctccgagggccggcggccttccaactcctggatcaggtctcaaactgcaacggaaacttgctggccccggaagcactgcgtcgccggcaagacgagttgctgcacccccagaggaagatatggcccccccgccagcagctcccaaattcggtcttggccgtggacttgcgggtcggcctattgccagaccgtcggcgcctcttgagcctcctgcccctacccctgccgccaatgctttggcagatgccgagcgtgccgagttagaggaattacgggcagagaaggagaacttcagccgaaccgtggaagatctgaagtcggaacgttcgaggctcaactcaacgatcaccgaacttcagaatcagaatgcacagttgattgaggaccacacccgcgatgtcttgagcatcaaggctaaagagactcaacttgttcgcgcacggagtgacgcggaaaccgcagagggaagtgttcaaaaacagcagagagagatcgaaagattgaagcgtgaactcgcgcgagcacttcgcgcgtctgccgtaagcccacctaacgctggctccgacgcaggaagcatgggcatgccagacacaaactcgatgtatcaagatcacatcggcaatggcaatgctgcttcacgatctggtctccacatggggtcccgcttcgaaagctcgcgtcctcgaagctatgcctctgccactcccagtgaggaaagggagaacaacgggatggaatcgccaggacccagtagtcgcaatggcggcctaggccgacggaacttgagccctacatacaactactcggccatcggtagcccgacgcgctcatccgtccgaaactccaatacaaatttcaacgaagacgatcagcagcacccccgatcttctgaaccagcagagaattggaagcgagccgcagaggtcactagtcaactaaaggcgaggatcgaacaaatgaaggtgagttgattgtttatctgattacgtatgtcttgtactaacaacaatgcaggtacgccaagggctttcacgacctcctcaacgttaatgaccaaatgaccgcgatcacgtttatgtctcgtccttcttcatgctatacaccttcttcgcttcaacctgtgtctttagatggggtttctccgtgtcatcattcatattaaaatcggcggtgagcatatctggtcttctgggagcatggtggctggctgagcttttgggtttctttgtactttttcttttttttttcctctcttagctttggccttggacctctgtatcttgctgtaatttcatcataccagcctcgtgttctcttattctgctcatggatattgattcctagtatttagtgtaataaagctgttattgctatcttgctagctctctctctctctctcgtgtcggctctatttttggaaacataagccgtcgccttctatgactggcctgaataagtgcccctcaatgatgtgacggtgaatgagtgctgaagtggcactagtggacgagtataaaacccactaagactacccctccttccttaatttcttcttacttctcacatccctcttcacatctcctcttacccctttacttcatatatcaattcacaatgggctggttcgatggtgactattccccttatactacctcgataccaaccttcgactaactcccatctctagatgactccaaccaggctcaggcctacaacaccttcaacggccagcaagagcacgacccctccgtggtccacgagctgattgccggtgccgcttcctacgaggcagccaaggcctacgagaaccacgttgctgagaacggtacgtagatagccccacccagctgagccagagaaaaagctaatattaatttggcaacaggcgagccccccagccacgagaaggccaaggagatcctcgctggctttgccggtgcctttgtcgaccgtgaggtcgagagccgcggcttggacttcgttgatgccgagaaggccaagtaccaggccagacagcaggtcaacgatgcttatgacaacaacggaaaccagttctagataacgaccttgtgggtgtggcatgtggatatattgtctgtatctagtccagttatgttgtatgtagcatgtgccggagatgtgtttcaggggggaataacccctcaatttcactctcacctaccgtattaccccacctgatcttgtagtgttgttaaatcttgaataaacggtctgcttcttcgatgcaggtccgtttgatagcagtacatgtatgtatgcagatgatatgtgccaagacgggactatcctttagaaaaaagacttggtattcttggcaggtgtcaggtcgcatgaagtcggagagaagggagaaacggaaggggagaaataaattccccgattcagcgaaatgtcggtcaagagaatttttaaccaccgtctgcctgttgactctttagacagattacattaacatcatacagattaactacacttgacaagatcatctactaatttactacaatacgaagcagacgacatgaatgcctagttctgatgggctacgaagaccatcaatagattgaacaggtagaaaaatgcattcatgggtatctgcagaaaggtggtacatgggagttcgtgagagaaaatgtgtctttttttgttagaacaggatccaaaaagtgccaaaaggctctttcgcacccatctaaagctaaaagatttggccgtcaatagatcgtcaaagccttggaacaccttgtcgtttcccataacaacttattatttttgagcgcttcgattagaaacgatcccgtcaaacagacatcaaagaaaagctgtagttacacaagcttaaaccttgatggcggcatcgagagccttacgcttcttctcgatgcgggcgttggccttggcgcccatgataccaccaccccagtggcggcgggagtcctcgtgcttgtcggtgtaaccctccttgatggcggagaggagcttggcgaactcggccttgtcctcagcgcgggtctcggtcagggcgagaacggcggaggtcttcttgtggacgactgtgccgagacgggccttgcccttgacaatggcgtaggggacacccatcttgcggcagagagcgggcaggaagacaaccaactcaatggggtcaacatcgtgggcgatgagaacgagggaagccttcttgttctcaacgagtccgacgacgtggttgagaccgtacttgacgtggtagggcttcttggagacatcctccttcttcttgccgtcggcgacggcggtggcctcctggacgagacgctccttcttctcggccttggtctcaggacggtacttggagaggagcttgaaggtctgggcagcggtgttgcggtcgagagtggcctggaactgagcgatggaaggaggaaccttcaggcgcatgttcaggatcttcttctggcgctgaagacggacatactcgggccacttgacgaagcgggagaggtcgcgacggggctggatgtcctggccgataccgaagttgcgagtgcgcttctcgataagggggttctgtggggggaaggttagcatcttccaatgcactcctactgggaagaaggaaaactaaccttggcagccttcttgccagcgccagccttgccctgggggtagggcagagcggcggtcttctttccggacttagtaggaggctatcattgaggaagaagatcagcgtgctgttcacatagtgctgcatcttctttgaactctaaggagaacatgagccaagccgtgttacgggcattgactccatgcttccagccatatcatcacacgatgcacgacacatctctttcgaggctgtgcgcgatcggcggaattgcttagatcagagatctgaagcaaagcgaatatcgtgagacatcgcgagagaactagaagaagcctctgatgttatcaagagacaatttgggtactcaccaccattttgtcgactgggattgcgctgattgacggttgacggatgagaaagggaaaagttcgtgtggatgcaccttatgaagtttctgtgggtcacgctagcgcagtcatgtgattagggcctagggcaaacggttagggcagatatactcggccacgtgacagatcacatgacatcggatatctcatattctggcaggcgcgctgagacctcaggctttaattcccgtaaacaccggaaaccccaaaatcatctgatatttggaccccttttgatttctcccaaaatcgatcgacttcgattgagacgatgtcgaaatacagtcttctattccaatgataggacgctaatcatcgggagtacggaaagatcgccgctactcttctccaactctgaattgggcatggcgcgtttctccagggctacgtggaccccacaactggcaagactttcctatgatgtactaccccgttttcgagtgtcggaaactaataatgtatcgcaatatagcaaaccctgcaagtatcctcctaaggggagcaatccagacgtgaacgagaacccagctggttcaattcggtctagcctacgactggattcccgttctcatagcccaactatgttgtactgagtcgggcaataccaactgttcaccaatttcatttcttcttccacgtgcaatgcgtggatgataacggcacaatccgcatgggactttatgtttcacgaattccaaaaaatacgtgaaatttcaacgagtcaacccgctcaacctttccgatgactcgctgtcggtgacgcgagaagagaaccaataggtcatcactaactccttggagataggttcgcacttttacgctcgactaaagcaattttatttccgaccgactctatatttattgcattgacttccgacttacccacgaaagagtcgaagggcacgacgcaaaaaaagtctagaatgcattatgcctgacacacaatatcaaccaatcgcgtgcataatgctagccctcctgttttctaggagtggcaaggctgattctccgtgggtgaattatatataaagtctttgagatcggtggagcaattcagcttcaaggtttctcttagtgctgggagtcaatatctctactccttcgtcggtatctcacaaaggagtagatcagccctgcattctacgaaggggcatcatgtgtctttgatacaagcacattttctgttgaagagaaaattgtggaggtcgtcgcagaattgcgaaaagcaattcagttctagcgtggtctcctatgaacgcagcagaaggagaaatccttaatgaagtttttctcttttcggtttcaccggaagcattttgccaacgcgccacaggaataacaaatggcggggatacttttccgaaatactgcctaagcaacggtataattctacgacacttttgtttcacggagctactgtgggggtagtacaataatgaatccctcgcagtgagttgaataattgtattatatttattcatgtaccactgactggattcccagggataacgagcagaagcttccttagttatgtcatcgcgggcgagcatccgggtccttttgggtggccgtttcccagatctttaggcaataactacagattcactttccagaagattgagcttttttctgcaacaggtttgggcacagaaacattgaaaaggtttgcgcgtatgggctgtttagtacatgatattccacattactggttagagatgcgtacagactatcttaaattaaagactcggagcttggggcgatttcatagattaactgcttttcctcaatatattactccggcactactaccggtactgctctaggagaccctcaatgcgtactatttcggatttgaaccagttggcgaggcgtggatcacctgatacctgaattagactcgcggccatgttgtattggtatctcatttgcgtcaacgccgagaatgcggtttcctggtaggaacgaccgagttcggcggtgaaaagaggatcacagctcatcagacgccaacggcttaaatcggtaaagtactctccgacttgaataacagtggcgaattcaaccgccaagtcgaactggtttttgcctagaggaatggccatgcggacggcattctgaagaccgggctctgactgaatctccgattggatatgcctgagggggttgcatttgatggagccttgagtgcaaatattgcagtcaaaggaggcttgaatacgcatagtctatatatattatgttagaataccagggtatctagaatgataagagatactgactgttagaggctccatcttcaaaatgcagtgtcttgatattccacaaagctcatactctggtgcacaatcaggattcggagtgtatacagccagtaaatgagcctccggcaaaggtccagagacagtgggtaggtcaggaggcgagggccagtagatgaagagaatgagcgaaaagagaggggggccagcagaaatagagaggggtcagccgagagacagggggccagtagatacagagagaagaagtcgacaaaaagagaggggttcggctgaaagacaggggttgacttcatggtttttcttttattggacgaaaatgaggatgccagctacgtccgatgcaagcccccgtatggagcgaatcacgttaagggccaatctgcgagaaccagccattcctcgacgtcccgccagcttggaaagatcaggccgaggactttcttcgagcgtaattccgtgaatttaaatccactcgcatttagtatatgaacgtacgacttgggggtccatacttggagtagttctgtgaggctcgtccgcgacgtaaggtttggattgacatggagtgccggaatggtgctagtggcttatgcgcttcagccctctagaagccttctagacacttttagggccttttagggccttttagagccgtttggggctatggtttggcttgaaatttaggactttactaacagctaccacaatgacccacttcgaatcgtataaatagttacacccttactatatccagcggtcgtggctatgccacgtagtaggctaaacccgctctttgccgagtggaacgtcttctaatatattagctataacggttcggagaataggctattgcagatagtccttctagcggatttccatgggcattctattggaaaggttaactaggcgtccacccgtttcgatactagcgaataccgggatagggcgcgcggctatggttaggagaatgcaaattgtgggctgatcgtagactgaatgtttagcagattcctctacctttgaacaatagtgagcctgagttgttcggacttccgggatgaaagttgtttccggagagttgcttgagaggagaagggaatatgctcatgaaaaatatgctcatgaaaaccggtttatatacatcgaagaaaatgggtatttggctttacaaactccacaatgtacaatcacatcactcaacataccatttaagggcattaataaccgacaagtatataaaacatcattcccaaatcctgccaagcaagtctagaatgcgtaaccagaacgccttggatagatcaaacgggacaccacggtcctcaaatccatcaatatgcaggtcatcgaagagaaagcatctgtccatagatcacatcacctccacgctcccaacccgggcaaagccccacgacccaaactggtactggcagcctgaacagcctttctcttccccaacgatccctcctgagcacgcacaccagcaatgatcttctctatatgcgtctcaaccacaacaccaccgacaatcatctcgccgagcaccgcatgcagggtctcatagccgaagatcagatccaactcgcagacattctcaaacatccgatccagcgcctcgacaaacacctgaatcagatcaatcagagcgagtggggactcggtcgacgtagagatcataatgaacgacagcgtcgcgtaggtccggtatgtgatttgggtgggggtatcggagggcccggaggcggtggagctggcgccttgcgagaggagaggagggagtgggaggaagttgcaggcgcttgctggacgctgcgcgactagacggtatatttgcgcgatcagggattgctgggtttgtgtgtcctgttcctggggttagtggtgtcctgcgacgggtgagggcgagggcgagtgcggcggggtatcgactcaccagctgtgtgtagaatttggtcagccggggttggccattgttattgaacacgaggactgcgttgatcattttgactgatgtgaggcttggaacatgggcaagctggagagagtgtcagtcttatctggatgcgatagctgatgatgcggttcgggagacttgccccgtgcgtcgatctggagaaattgataccaacatctacatttttttttattcttggctttttgtcaaccctttgttgggtgttcgcgagtcataatgaactcaataccagcatgcaggaatcctaaatctaggatatcattatatacaaccatacgggccctatcctcggcctcgaatccccactccaagcgcgaactcaaagacctcaccccgaccgacctctgctactactgggataccagacccccgaaagaggagcaactagcctttgccgataaggtcttcacgccatcgcgtcactcgccgctcaaactctggtccgccgccaaattccgcaccacaccattcgcatcagtcgagccggaagtcgcattcttgggccgctcaaatgtcggcaaaagctcactactgaacgcaatcatgggacaggagatctgctggacatcgtcgaaaccaggccggacgagggaaatgaacgcgttcgggattggaggtacaaagggcggcgagtcgaaggttgtgctgcttgacatgccgggatacggaaaggcgagtcgttctgagtggggagcggagattatgaagtatctccagggacggaaacagtgagtcatgatgcctgtcaacctaccgacccatggtatgtacaatgactgacaaacatgttatagactccgtcgcgcattcctccttatcgacagcacgcatggcatcaagcaaacagacgccgaaatcctcagactattccgacaccacgcaattccccaccagatcattctatccaaggtcgacaagttcctcgttaaacaattgaagcagataaagaccggggtcacgcccgccaatatcgagcggctacagctcttgctccagggcatcaaacccattgtgcagccggacccgcgggcttcggaggggcctgggtctttgggtgagattttgacctgtagtgccgaagcacggattggtcctggccgggcgctggggatcgatgctgttcgttggtcgattttgtcggctgctggtattgatgggagcttgcagggtggccggcttgctgtgccgcctcctgcagagacgccggctatcttgtcgtgaagggcatgccttgttgtccgaattcaagtttaaatggagagaagtactccgtatgttgtaatatacatacaccccccaaacctactaaatgcttatctacaatatacacacagcactgttggctgacggtgtaaattattatgggccccttggtgacctccacgtgatctagttaccataaatcatcataactgatgcatacaaacattgttaatgaagctattcagagattaccttatcaattcgtctattaattccggatctgggtagtattggtaacaaggtaaactcataaaatgtttcgaaaccacgataaggtatacatttcgaatcaggttgaagcaacaatacaacaatccaataacgccaaatgacacgctaccgacagatcgactgtatacacagcggagtaagctgtaaatctatttcttgcgggttctgtgacggccgtcccatcaaagtctggaaatcaatttccagtgcatcaccagacaccactccattcctgagcctggccgactgagtacactccagggcgtgagtatgctggccactggtagtagccccaactcttcggttgacaactggggtccaaatctcgatatctgcatcgtgggacctaggattggcggagacaaggaccacaagctgggtttggtgatccgagttggagtaccaccagcgggcatccacctgtagctgagggacggactcggataggccgacctctagcacaagagagggccatggtataggtgccccggcggccggttccattccagggaaaaacgatgcgtctgcctccttactgcacatacgaccagccgatcgtccagcccctccaagccaaaaatcatggttgatgaagctcaaccccatattactaagagcatagttaatccaggtatcaaactgacggcttattttctcatgatagtggtacggtatgatcttatataggatcatatgctcgtggtagagaattgttgcgcgcaccccttttggaacgtcagggtgttcaataagcgccgaaaaaagatcgtccgggatccgttgtaccagaaggtattgcgagctaggagggtcctctgacacaagctttgttttgagtacgtcgagataatcccagagctcatcgagagaggagggtcggtcgaggatattggcggttagaaggattgtaggatcgaccccaaggtcaatactttcggcgttagaggatggaagagataaatcggcgctaccagaaggcatagcgagatgggaggtgggaggtgaagaattggatgggtaggaagtctgagaagtttgatgaacggagagaagagaccactgatcgaaatccttgagatggagatagcaagatatgtgcttggatacttgtagagcgtacggagtagttacgacccatgatgattgaacttacgtcacaataactcagcctcgaggtgtttatcctatggtccatgttggaaacatttgaatgcttcgctacgagaaccagcagccgtaagcagaacacatgtactatattacaatacaacctaaacaccaatccaactcatgacacaatttggaacagatcataggtaaccaatctattatgggcagtccgatacggacaaagcaagacgaaaaatatgtaaaagaatcaccgatctggcaggcaacagaatgggaagtcacataagcatcaggcaaagagaaaacgtatggatggcaggatgcatggggataggcaaatatttgggaatacagaatgatagaaacctccacataagagatgatgaaagatatgaaaaaaaaacgcctggtcccttatcgtaatgctgcagaaccaaagaatgccgaccgcgctatgcaaaggatatttttccgatggaagacgagagctgtaaggatgggtatcgtgaatgggggaatagagtgagaagagaagaaaagacagaggaaaggaagttagtataaggagaaaggttgtcggatgttgatattgatcgagggcagaaaatgcgtgctaagcatctcaatcagacaagtcgtcatcatcttcgatcccgccgaggacctcctgcccacgtcggttaacgacaatgcgttttgcaagcttgctttccgggactccatcccgtgcagcaccaaagtcgagaacctaggtggaaacaatattagcattaatcattggaatccctcattagagagaacttacttcgatataagtcaaactatcacgttgcaccgcggcaacacacctccggtcattgaacttgacttgccacacgccactaaggtctgtgaggaggtctcgaacacactcgccgtttcgcacatcccacatcttcagcgtccggtcagacccggagatgaccttctgtccatcgtgctggaagcaggtgatggcaccggtgtgtgcgctcagggtgttcttgcagtggccatgcacggagtcccagattcggagggtggaatcagcagcagcagagacaaggaaatcgtgctccaaagcgagcaggccaacgagagacgtatggccttcaagattatataggatggctccatcatctagtgaccaaactttaaccatgtggtccatggctccactgatgcaacgattgcgcttatggtcaagaaccacgctatacactttcatcgagtgaccctgcagagtatgtaaagtctgtccggtggaaaccttccagaccttcaccgtgcaatcgtaactaccactcacaagggtatcaccatgggctgcgattgcacgaactgagtgctgatggccggagagcacacgcaggaagtatggacagctagcgtcatccaccgtaggaccactctgatagtagactgggtcaccgggtttgggaagcttccacacccgaagatttgagtcacgagacccagtaatgatcaatggttctttgggcatcatctcaggctggccatctgcattcctacctacctcggcaggcagaacgatttgcaagcatcggactgtggaagtgtggccgtggaagatctgagtacacctagcccgctcgatgtcccagactcgcactgaacgatcggtggagccggagactagcgtgttgccatgatattcaagagcccatactccaccttcgtggccctccagcgttgcctgcaacgcgcctgttttagtgtcgtacacgttgatgtttgtgtcatcgcttcccgtaagaaccttgtcggcgtcgaattgcaggcaagtaacaacatggcggtcatgagcacgaaaagcgatatgttgcggcttaacatccggctgcatccatcccttatggatggcaacatggcgacggtacagaactttgaagaggaacagcccacgaagagatggtagacccacttcggcatagggcaccgacccagctgcagcgctggcagcggcgtacggggcctctgacgcggcaatatctctcctccagtctggatcggggagttctcctccactggatgagacctttcgcttggcaagcttccggcttgaagcacgtgtgtttgctttccgcttgccccgtcggctgattggcaaagaccctagagggcttctgctgctgggacccgccatcgaaggaacaggggacccttccatatccgccctggatggagtcaaaacgctgagatcctcctcatggtcttcagggccgctggataactgccatccccatccctgtcttatagcccgttctagttctccatctgagagatgataaccatcttgctcgaggagattcctccagctcttttcatccgaattcgtaatgtgtctccacctcttagacacctgcgcagcacgacacatcgtctgtacgtcaaggtatttgacgatgttgagactaagctcaagcggcagaagagtcaggaagtcgcacttcaatgttggattaacgacatcggccacgaaatgaagagtaggtttagggcatctccgaagaaattgatacatgagatacgtcttgacctcatcaggcaccgaatcaaaaaactccaataccttgggcatatctaagagggagggaggggaccgtgagtttgcgagagaatggtcatttacccgagtctcatctgcatcttgaagccgcaagaccttagaaaaacgcgagacattatgatcgaggctggaatctgtatcaacgtcaagcccctctgactcgaaggaggattcgtcatggagggcattcatagcagcaaccggtgagagacttgggctcgggaggcacatatcctgcgccatggcattgtctattgccgatagttgagacataagctcgggtctctcttgcattgcagattcctgtgttccatatgttgtatcatgaccaaatgaggctgattcatgtgcagttgaacaactctcatccgcttcagtagcctgagattcttggtttccggggtttgaacgaatcccagaaaatgcattctgcaagtaagaaccttgattggatgcctgtaagcccttagctccgatttcagatgagagaggtgaaggcaaaggaggttccctgcgcggaaacaccgagctgtggattcttggtcttgggggcacattctcgccaaatccgctcaggttgctttcggtgtctggggtggcaaggccggcggcaagatgagttgatccgacgccactttggcgagtgcggcgtgtgatgggctcagaaggagcccgtgttgggcgagttcgtgggagaaccgagggtcgagtatcgaaaagcgtgacgggggatacggcacgacggcgagtattgaaagggtggctagaaggttgactcgctattctcggaggggtcagccgccgagtggggttctcgccctcggcgatgaacgagttcacagagcgaatcgggccatttgaagattttaacgcctcgcttttctccttgtactatatattattatactgtaagcattggattcgactagaccaagagggtaggataaaatcgtacctcggcggcagcatttatagtatcctcgggctcgttaaagatgatggacttctcgccgatcttgaacttgaggttccttagagccgctggagttggagatgaggcgagagggtactgtcggacatccagatccttgacggctcgcggggggttgattgtcaacggcgggaagaaggtagtcgtggtggtagtggtcgtcaccaccgtagtccgggtagtcggggcgaaggagaactgtccgatggaggcatttgatggcccttggcccagctcctctctttcgtccatttcacgttttcgaggacgaatgaatcgagatccggggctgtgggtcgcgtgggaggtcgcagatacggatgcgttgtggtcagtcaaagccgagtcgacttctgatatttgaagggagctgggagcatttgaagtcattgtaaagcgagctcatgtgcaagaggacaaagaactgtgaatgtcccaaattaactttttttagcaaaacaccccctcagcacggtacaccagcaaaaccatcgatgcaaagggcattcagcacatagtgtcaagagccgaggataatcaagttgttaggggggggaaatagaacacaaataatggaagcaaggaagcaaagggaaggggagaaagaaacagtggcggctgagaaggagttggggcggagaacaacatttattccggttcccgtggacgatgtcatggcccaacgtgcaacatttggattctttctgattctttgctatttagctgttgatttttcatatattagacctgttaccttgactactgtctacggatgtgaaatgccaaatgatccgagtgtgaaacctggagaaagggcccctggttctgctctagaccggcagaactgattaccagatagaggtgggaccgaggagacactcagataagccggttgacttcctcttgcccagcgcctttataacgtaataaccaggattctattagctattcgcccctaaatcataacgtaatcggtaagcgagtggccactgtaagcgagtggccaccccaccccannnnnnnnnnnnnnnnnnnnnnnnnnnnnnnnnnnnnnnnnnnnnnnnnnnnnnnnnnnnnnnnnnnnnnnnnnnnnnnnnnnnnnnnnnnnnnnnnnnnnnncgtaatcggtaagggagtggccactgtaagcgagtggccaccctacccaagagtatagttttctaaggtaaatatttcaaccagaacgccattaaattaattaaactaaaaaagatcatttatctggacacctattgatcttatgccctgtctttccacacccactacaccttggtgcagcccgtggtcgtggttctaaccctgattgagtgcttccgcccggggggtgtaggggtatttctaatgcttccaccagcctagcaatgatttcagaagcttcttgaactgagaggccttcttcggcgggtatctgccgtctagatcgggcccgcttttgcttcttattctcattttcatcccgtaaatccttgttttctttcgctagtaaaatagcgctatgcattgcaagctcgcagcctttgataagttggtttaatgcacgtttagaagggcttattaggcttcgagattgggttcgaagtaaagctttaatagacaaagcctgtcgacgtagatctttgctattaaaaggggtttttggggtgaaattccggcttgaatcgctaccccggcttagggggggggttggcgttcgaagataaatattaagttttaaaagtacccgattaggtaaaaaaggtattaaaccagctgctaagaagctatttttaattgtctccaatttaaaagcttcaatttatacggaggggtatacttcgaggaatttaagtttattaatatagttaatcctagtccgcatttttatcttaaccaaccggccatataaccgttttaccaccgtaaaacaaccgatattaagaggttataaaagataagaggaatacagtagtatataaattagtataatatcgttttccttataaatttaatcgaattgaggggttaaatggcttctatagctatcgagtactaaaagtcgataccttcctactatatataataaagttgatagtataaagagtttctaaagctagcgaagtccaatttcatctgatatctatctatttagactaactttaaagtgctagttactaggaaggccttcgaaccataatttaaggaagaccttacctttaaaaataatatatagagggaggacctatcctaccgcgtttatacatttaattgcagttacctactcgcgatttctaggttgtaaaagtaatctccaactgtagtatttacttcttattataacctttgccgttatagttaatcctattataaatccagtctcatcgaagttataaatatcatctaggttaatcccaaattaaataatagttttttaaataagattaaactattctccaatgatttttaggtctttacacttcgcgcgcttataattataacatcttaagaaccgagaggaaagaagagggcgttgttttatgaaattgtaaacctatttttcgctaaccaaaatgactagggtagttccgcgctttttaagaagaagattcgccatttcttataccatagagggccggggagctgatccacgagaatccatagagagaatccatttttgaagagattcctcttcaattgtagtcaatttagtcgagttggcgcgagaagtcgcgcggcattgtattccatcgaggcggcgccgaagggttgaacgcgggacgttaaaggtacgggcggcaatagaaatattggtaaattcttgtttcttaaaagcctggatagctagtaagatcctaccctcctgctctattgaatctttagaggattgagagcgaattggtggcatggtgggtggttgaactaagtaagtgctaattcatggacgcgtttttgggtagggtggccacccgcttaccgtggccactcgctttccgannnnnnnnnnnnnnnnnnnnnnnnnnnnnnnnnnnnnnnnnnnnnnnnnnnnnnnnnnnnnnnnnnnnnnnnnnnnnnnnnnnnnnnnnnnnnnnnnnnnnnnnnnnnnnnnnnnnnnnnnnnnnnnnnnnnnnnnnnnnnnnnnnnnnnnnnnnnnnnnnnnnnnnnnnnnnnnnnnnnnnnnnnnnnnnnnnnnnnnnnnnnnnnnnnnnnnnnnnnnnnnnnnnnnnnnnnnnnnnnnnnnnnnnnnnnnnnnnnnnnnnnnnnnnnnnnnnnnnnnnnnnnnnnnnnnnnnnnnnnnnnnnnnnnnnnnnnnnnnnnnnnnnnnnnnnnnnnnnnnnnnnnnnnnnnnnnnnnnnnnnnnnnnnnnnnnnnnnnnnnnnnnnnnnnnnnnnnnnnnnnnnnnnnnnnnnnnnnnnnnnnnnnnnnnnnnnnnnnnnnnnnnnnnnnnnnnnnnnnnnnnnnnnnnnnnnnnnnnnnnnnnnnnnnnnnnnnnnnnnnnnnnnnnnnnnnntatcctcttgggtggggtggccactcgcttacagtggccactcgcttaccgattacgttacatatcatggtcattcatccaagttctatcaagtttctgatttgccatcgccatgcatcacgtgaagtgggggcgtgcctcgggtggcttcttggcacggggcgtatctcattgttatgaagaaatcatttcccagggggctcattgggcagacataggggtacagaataatcatcgtgcagtccattgtcccttactactgacttactctatgcatgtcatatactctccaggtgcaatacccaccggctgatatctgcaataacaatgtctcgcccctccccacatcgatttagggtttggttgcttttacgtactacacctctccagccctacctctaatgatatccttggatatattcgcagcgttacacttgatttgacagatgacatatctagaggaatatatctggacttgggtcaatgaatcatctggtcccttgtttgctggaaatccgatacgagacaggattatgatatatattccagggcaaagtgacgttatagatgctgacgtagaatgaaaaaccaaatggtgaagacaaacatgaaagatgactagggccctaatacaatgggatctgagctgtgtctatgaatagactcgctagttccaaactttgttaatatctaagaatgaaatatgtttcactcgctagagcttgccgtttcctgatgctaagactccgagctaagcaagacacatcttctacaaaaatgtccagatcctatgatgtttccgagtttgctgaatccttagacgacccatcgataatttgcggactttgtaccgggagaggacgacagcggcttccacatctatgtttccttattgtgtttctttgcctaacatttgtttctcttcgattgatgttcatgcctaacatatagaagagtcggacctagagtgaattcttctttctgcctcatccggtggcgaggctcactttccttcggtggaggaagctaacgacgctgcagtgctcccttctgacgaacttggattcccattcacatcgaatatcttgatgaagcactcattcgacccgggcgcacagacaagaaagtgcattttaagctcgcagatagggaaatctcggctcaaatttttaacagagtcttcaagtagacacccgaccacaatcactctaagaagcaaatgggcgacgagacgattgcgaggcttgctaatattttgcttccaacgtgccagatcagggtttcagataagatatacgttagaaacgagccgagggtaagtacaacggagagacaaacgtgcattctcccaagtagaactttccgacgacatttgaaagtacctagttgaagcaccttcccctctcggcgtagaaggccttctccatatttacaaccacgaacgaggggattgccaatgtgagatttatgtataaatcaggaccgtacaagaaatgcatgtccaaacagactcaaaggagttttggctgagatatgcatatgttgtatgaaattagtatgtaggttgggttgggtggaccactggcttacacgtgtcacgtggatctaaccctatttgtggcagatctgcctggaggcttatgtctaggcccctctcaaccccgcccttgacctgcactctatggcatctatattatcccccgactgaacgggcgctacaattggcactcttggcgacctgagaaccggggaatcgcgggattaaactgcgaggctgcagcgagtttcagtctctggctcagcagggcaaaatctctccgggcaaaattccatcggatggatggtgtcggtccgacccgccttatcttatgcacgttcatgtccaacgactgtttggaaatgtggtgtctagactcgtacggcagaaattgaaagactgaaggaaagatggaaatgtgcaccgaggatgacatgagtagcagggattggctactgcaaccatcatcgaagcgtaacgcaggtctgcagtggatgtgtacgaatcaactgccgtctttaaaggagtggagcggaatgaccccaagggatgtgatgtgtctgaggtgaggtgcgttggtcatagccatcagcccaataccctttcgctgaactgcccatccccaggctagcggactgatgaccatttctctttatgctttgcccttatgctttgcccttatgcttataactcattcctgcaagcaatattaccggactgaagagaggtttcgcagcaagcagcagcaactgttcacggcggggagcggaacccgctggacagcaccgggctctgcctactgtccctcgatggcggcggcgtgcccggacgctcgaccctgtacatcctgaagggttgatggattgactgaaccagacacgccccgagggtgcacccgcaaagaaaccctgcaaggtgtttgaccttctaggcggcactagtacaggcgggtgggttgattcagtccatggtataatatcggatggcttacagatgtagattgattgcaattatattaggtcgattggggatggatgtcgatgagtgtattatggcgtacatcaagtttacgaaaattatttttgacaaaccctcaaaacggggcgtatccagcctttttggtaagattaagccccaattcgataccgacaagctcgagggtgcaaccaaagaagtcatcaatagctatagagctaagccgaccgatttattcaatcatcaagctgacccaggttgccgggtgtaagtgtatatgagctaatggtcccgtatcctgctaacggctccaggttcgtctgcagcataacgtaggagaccagggagatcgtgcaccttcgcagctattccatacgcaacaagcctggaattccggccaccatcagccaggccgcctgcgcaacctccgccgccacaaccttcttcaagccggtgtctattggggcacgcaaattcgtggatggtacgctcggggcaaaaaccccgtggatgaagtggaagacgaaacgtctgacatctggtatgaagaaacaggcgacctgaagccgctggtggagtgctttatcttgatcggcaccggcaaccccgggaagaaggcgatggaggacaacctactcaagtttgtttctaaaaccctgccaagtctcgtcacctaaactgagtatacggagaagcgattcatcgctaaatggcgacagcattatgatagcaagcgatatttccgaatcaatgtagatcaggggttataggacattgggctggcagaatatcaggagcaaggcttgattgaagcagcaacagagggatatctcgaccaccaggcagtggcattccgagtgcgggattgtgttgagaatctgagataaaagtagagtgtgtatttagaagattttacatagtcctggtattcttcggctaacggatacgagacgtgattgatagggagggtcgatgctggtatggatgtacaggcaatttgtgcattttatgcactttatgcactttttgaactcttgcgccaaaatgatgtcaagtctcacgatttggaaagtgggatgtgaaatgtggaggatttccctgatttccatgattttcgttccatgatctgcaccgaagacaatagatcgacaatagaggcgtatccgaaaccctgggacgagactaggctattggagtcgactattggcgaccatcaggggttaaccgcatgaccatccgacttagccgcctaccaaaccactagctgttccggttgactgcgcttggggtgaatgtggcgctcggagtattttcttttcttttgtctttgtgtgtctgacgagtattcgaaggatgtgttgttgttctacatatcggagtcggagcggcagaccgaaacccgctaattacgtatacggaggttgatcggcgttcgtccaatcgatctcggagatctcgatctgagtgaaattgcgccccggagtgtcatcgctgcttgttccgcctcgtgggtcaaagacgcggcacatgggctgattcaatacaaagtttgtctatagtgtttgtgcctcctatttttgagaaattgcgctcgcatgtttgacaccgagtcttacaatataggtaaggtccctataaaagcgccctcgcgatcttggtgacacccgtgaattgtcaaaccgtgttaaactgtcagtcgcaaacgatcagattcatgtctcagtatcttcccgagtatgtagcacatgcgaaaggtggagtccgaaaggagcccgcatgcaagtcgatcattgccagttcctgggcctttggacgtgtatccatggaacagagagtattcttagtcgaaacatcactgcccagggttcgagggggcgattacggagtttatcctccggacacgggctggtatttgtcatggagcacatcgagtgggggcctctatcgtattagagcggttctgaataacaagatctcagaatacttcgctccggcgcattgataaacgatcgatttgtcgatctgctctcagacgcgaccgcaagttccagctatggacttggtgtcgctcaaatatggatactccatagttcgtggctctagacttgactagactccacattctggcgatagctccgtgctgtgtgtgttttaggaaaaagcatccatgtgagtggataggacaagcggattggtacctgaattagtggagcagacggagttataattccaattagcgacggcaaggacgtgagcagacctcgtgggaggcgtcgatagcgcaaactcacggacaatgccacgttcttgatgtgggcgttgactattttttttaggttgcagataccgcagtaaggggtaaatgttaagattcgaagtagtatatgtacggagtatactaaggaataatagtgttatgcaaatgcatgttatatagcatgatatgtaggttagagcatacataacccctatcacaaccttggatatcacatcctacacgaagccctaaaacttcgtatccatatactccgtacttccagtatttctaatattatatgtcgatcaactctcgagagaccgtgctccactcgaaattaaatttggaataaatgaaacgctgcttttcagcctatgaggattctttaagacatcggtggagtctcccccctttaagcgcgtgaacaggaaatctttcaaactcatttgcctgttctgtactacactcgacgctttcgtacaaaaaacatccgaatcccaactgatcacgcattttggatcttttatttttaccaaatctatacatcccttccccagtcccgagtcaatccttaaacagcaaacgtttctttctatttctgggtacgttgcggttcagcccaatttcccctaaattgcagactaagtaactaatttagtggagtagattcaaccgaagcgagatacttgaaccaggaacccccccgcttacacaatttgcgcattcagtccaaccattcgcatcatacgattcatgcgcaattgaactgcgctctgtctctcccaccatgggacaccgagaactcacaccggtccatgtgccacttcgaacgtcgagtcgcaaaccggcacaacacgaaccaatgaacacccaggaacagacccgagtcgaccgacgaacctcgaaggcccaaagatttttcggaaccgatatatcacttcccacggaacatggcgggtggcaggagcctccaaatgtacaacgaccgagctttgcgaagccgaataatgctcctagacaaggtaccggtctggttccgtttccgcgttcttcagagaataccttgattcccgatcagaaccttcgcgtacgggcttcatcgcctctgctaggccaggacttccgatcccaggaggccgcgccgccgcttcccaagtcttcgaaaaaggttcaccattccggttcctcgtccacccttttctcctatttcagctcgaaagaatcggccaaatcggccaaatcgcctaaatcgcctaaatcacccaagaaccgtggactccagccgagagtacggcacgaactctccagtgagccccaagtgacatacacgaagcctcaagaatcaccgaaagaatccaagcggaagatgcgtccttcaaaaattgatctttccgtcttgttcccgaagccgcggaatccccaaccccaaacacttctgtccccccaccggatggtcaactcgccctcccctgtctcttcaatggacccggatatttcttcaaacaagattgaaaggatgaccggcggcatgagcaactccaccacgaggagatacgacgcacctccccctcgatcttcaatcaccaagaatgacctacccaaaaatggtcttgatcacttcgatttgccctcgattgcagagagcaaaagtaacgagtggttggagcaaccgcttgagcggacagtaggaacgagtgagattgatatagccctggatagatatgaggggcaacgatcactcttgagtcgctcgagcacgtatactaccagtcaagagcaattacggccagaacagcaacgcccccaggaacctcgcaagagctcaagacgtcctcacagctcctctcgacctaatgagacgtacttgagtcctccctcatgtccagacacaaaccgtggtcgcgtcgcgagtacctcccaggagtcgtggaagactaatgagtcaaaatcaaagagcgagaagagctcgttgaccaagaagggcagcaaaagtactttgaagaacaaagatctgcgaaacaccagtatgctttgcctttcctcttcttcagaggacgaggatgaggaccgaactccaaccaccgacaagcgctatacaaacaagtctagaagagacagtgtggctacttacgacgaatatgagccccagctctacacggcttctactgcccacgcgaccactgccacggcggcgaaacgctttgaccggagactctcgactagcacgcgtggctcccgccaaaccgaaaagagcctgccagtgctcgaagctcgcccacgaaaggcttctcaatcctcgaatggcaagtcttctcagaaatctggacgaaccacgcaaacccgccgttcgagcgaagttcccgctatcccagatgacattctggcgcaattcccacagcagcctctacgtacccccgcagagttgaaagagttgaaccggaggagtcgtgtgatcgccgtgacccgccaagagcaggatctcctcgaggcgatgcgtattcgaaagggcaaggtcacacccagtttgttgaatgcgcacggagcggatagaagatcgctagcctctggcccatcgcgcgattctttctgcggatccgacacctcattcttgcgtctcagccatgtattcccgccattcgatgcaccgtcagaaaagggtgctacccaatacaaagatggaacgccctcccaaagctcgggctcggatagtgaatggaaaccccgcactgcagtttcctcctctagtctcagtgtggactattccgaaagcctgccatctccttccaccagcggtgcttcgccgctgacccccactttgccaattcatcgtttctcgccgcttccctcttccaagcccccaagagggcccccaccggctatccctcaagagcagaagcagcacacccgccgtcgcaccgatagtagcgaggctatcctgctggatagtggtggtgagtcaaaacgcaacaccggccttcctctctggtctttcgactttgattggaaccaggaaagtgccaatctccctcctgtgcactgatcgcttggcccttgataccagacactctcattccatcccttgcatttcctatttcacccttctatctctctctattcctacttgaaatgaccttttacggtcttgcctgcatttccttgacttgcagcacttcgctccaagcttctctttacccaaccacatagacctcttattcctttcctacgtgacccttttgcttatgtcttctcactatttattcttttctttttggattagcgttcactcgcgggcttctgcacctgctatcatgttttacttggatggttttcgtgcctttctcacgatctcatcatttccggctcacgatcataatcattaatatccccaatgatcatcaatttatcaactgaactcatgcaattttcttgcccgattcttcacataattcctgccgcgctctagcttagcctgagtcgggtatcgcggtgtatagcggccatttgggactttgggctttcagttttcgccgctcatatatctctcttctagaatttcaaatactagggtacttggaatgttatatcaacctcctaatgggatcaccgtgtttgttgtaagtttctcatttatatagaagcaagatagttggccgcttatacaagctctttacttggcgagctaggatttgaagaatctgaacatcttgtcttgttcaatgtctttgtagatccctataaatgcccatgataaccaatcttggatatgaaatagacaatatcgacgaatgacgacatgcgaggagaataacaatggctgtgaataatgtctggctagctcgacgtcatcaacaactctcccaaaatccagtactccacacagaacattctaaatgtgatatgagatacccacaaaaggtacacagccggaattgtacacatcacttacctcacgcgacaacttccaaggtcgaacccttggtgagcagtgatccactccttgaccgccgaccttttcgtctataaccccggattattgcttgagcactctatcatcttcctctcctttcttttctaagctcttttccaagttcttcggaaccctcattcatacagtggagtcagccgacgcccattctctccttcgcctcccagccactcgcgtcgcctccgatcgccctcgggaaaccctatccggacctaaaagggaagatctccagaccagcccacccctggttcgcgagttgggatttgcagtttgctctacggaggacatcatcatacacacttttcctgtcgctgcctcaactgagcccatttaccacattcacggattggggaacatactgcgtgccccttttgcggaaacgttagccgctgtttatagggaacacgtacttcgttatgggagatcgcgctcaacgtcagccgtctgggctgcgagctgcggccaatgttgcgccatggattctggtatgagcttgttggggaatacagcttttgcgatcttgggcactgttcgctgacttcgttcccttccagttgactgcggaatccactgcatttgtgctggtaagtcatcctgcgcgtgtagattcttgtgacaggaagatgagaaggctaattgtatttttacactatagctagctcactattctcgagtcatgccacccgccggtggtaaacgctacctgacctctacagcagtcttcctagtcgaagtggtcaagctggccatctccctcacaatggcactctacgacgtctccaaaaccgccccaccctcaatgcccgccacctccctcttcttctccctcacaagcgccgtgttctcgggtgacagctggaaactcgctatccctgccgggctcgacgtcttgtccaactccctgctgtacattgcgctctcgaacctacgagctgcatcgttccaggttacattccagctgaagtttcttaccactgcggtctttggcctgatgctcctgagacggagcatccctccccgcaagtggggcctgcttttgcttctcattgtgggcgtggcgttggtgcagatccctgatgctagcccagagcaaatgttgcaggatgatcatactagccattatttccctcgatccctggaggaatggaaagctgtcaagcaaggtgctggttctggcagcagtttgcaaaagcggtctgcaacatacgagggcattgaggaggacatcctgacggctgacccacacttgaaccccacaattggtctccttgcgaccattggggcgtctttggcttctgggcttgcggggatttatttcgagaaagtcctaaaggacagctcgaaccatatatcgttgtgggtccgcaatgtgcaattagccgtctactccgttttcccggctctcttcattgggattgtcttccgggatggtgaaaagatcgccgaagatggtttcttccagggctacaattgggcggtgtggtctaccatcatcctccaggccttgggtggtatcgtttctgcattctacgtcagccacgcgcagaaggatgcaaggagtttcgccacaactgccaacataattttgagcattgtgggaagcatctggctatttgaatttgaggtcaatgcaagcgtaagttccttgcctctcaaacacttctcttctgtttcagatgcgccctcgacatgaattatgaacaaaactgactgggacattatagttcctcctgggctcggctgcagtcctggtagcaacccactactatgggaacccgaccttcagccctgtgatgggtgccttgcgtccgcctccaatccgcatcgacgcctacgaaaaggaccccgcaggtgacgagggctcccctgtggtgccttccaatgacttctctatcaaacttccaacctcacctttcctctctgacggcatgtcgtcctcccgtcccacctcaccagcaccaggccataccagagtaagctctagccggaatgcaagcgcgaattatttcgatgagaaatgattactgtaactcgctatgcatattgctattggcccacctgacgagatgctctttacgggaaatgatattggatacttgatagatgcgggtggaagtgcggtgttcaagaaagccgcctgtcgcaagcccatttactatgcttggtgccgctcccaatttggagcgtagctactcttcgctgccaaattttgccctcttactgtcaagatgtttgccggttttggctcatgtatgcatatatacgaagcaatgaaagactttgatataccccacgatacttgaaaattgctattcttactgatttgagaagaaactgctgcagcatatgcatatgttacaaaggcatgggttcgcccacgtgctgtcacgttatcgggatgatggaccttggaaccaaggcactttcaaaattcatcaccacaaccccatattcaatcccaatcatcgagaacgcatctcaagatgcggagaaataatcagacatcgaatttcaaacccttccaattgccttcccagaggcgcacaaatgcctcctccccgtccaagaatagtagtataaccaggatcatcaacgagaaactcatccaaggctcccagaagccacaatacagcagcccatctccccgaaagccctccagtggcctgggatcatcagctcatgatgacgacccccaattggatgcttttggtgagtctgccggcttatcatcatggcgggtgctgattgaatccagacctagaactactagcctcagaggatatagagaatcaggattcgggatttggagtttctcaatctacaccgcttcaagcatctcgccatcctgatctacagacatcccatgtctctcgtttctttcagcgtgagttgcttgtatacccgtgctagtgttcctgtcttgttgattcggaattaacaagtaatagcaagctcgagtaccgtttcttctcgctggaatgggcccggttcatcggacactgttttagggcctccctcgagcccgttggcttcgttccaccagaagaagaatgggatacggatgggacagcgcagccttgagacgaatcgtggcccataccgcaatgagactagtcaatcctcaccccagaaaccgatcgcccaggcgggctcagaggctttgactggaaacagacaacgtcaaagcctattcagcaatatcccatcctctgtgcgggggatcgtactcgtatcagtgaatgacctaccggagaactaccgctcgatgttccccttcccacttttcaatgccattcaatccaaatccttccattccgtctacaacagcaatgacaacatcgtcctatccgccccaaccggcagcggcaagacagtggtgatggaattggccatctgcagactcctgaacaccctcaaagacgaacgcttcaaagtagtctaccaagcacctaccaagtccctttgcaacgagcgctttcgagactggcactccaagttctccagcttgaacctcaagtgcgcagaactgaccggagacacggaccacatgcagctgcgcaacgtccagagtagccagattatcatcacgacccccgagaaatgggatagcatgactaggaaatggaaagatcatatgaagttgatgcagctcgtgaagctctttctcattgacgaggtacatattctgaaggagacgcgcggagctacgctcgaggctgtggtttcccggatgaagaatattggatcgaatgtgcggtttgtggctttgagtgcgactgttcctaactccgaggatattgctacctggcttgggaaggatgcgacaaaccagcatgttcctgcccaccgggagcatttcggtgaagagtttcgtcccgtcattttgaagaaggttgtctatggatatgcgtctaactcgaatgactttgcatttgataaagtctgcggttcgaagtatgtgaccttttttgttctgcctttttcctttgaattactcgttggcatactgattggagcttgaaaaggttacccgaagtgatcggaatgcattcatgccagaagcccattctgatattctgttgcacacggaactcagcgcttgcgacggcgaaagaattggctcgccttcacacattgacgaatccacctgccaggctttggaaggaacccaagaagcgcctcgaggctcataatgaggatctcaagagtatggttcagagacttactctaaagaaacacagctaattcgagatagcaacactcgctgctggtgtagcattccatcacgctggtttgggccccgctgatcgccacactgtcgagacaggctttagagacgggcatatcaacgtcatatgctgcacgtctacacttgcagttggaattaacctgccttgccacctcgtcataatcaaaaacactgtctgttggcaagatggaggctgcaaggagtattcggatctggagatgatgcagatgctgggccgcgcgggccgacctcaattcgacgatagtgcaacagcggccatcctcaccaggaaggaacgtgtaagtcactatgagaaactggttcaggggtctgagagtctggagagctgcttgcatttgaatttgattgatcatctcaacgctgagattggcttggggaatatctcggacgtcgaatcggctgtcaaatggctcgctgggacattcttgtttgttaggcttcgtcgaaatccgacgcactacaagctcaaagaaggtgcaaaccaggaagacgaggatgagttgcttcgccagatctgtgagaaggatatcgatcttcttcggaaatgcggtctgattgaagctgagagccttcgatcgacccagtttggcgacgctatggctcggtactatatccagttcgagactatgaaagttctactgtcgctgaggccacaagcgaccttgtccgagactgtgagcctattctttccgcgctgttgaaatgaagtatcttgactgacattagtccagctcaccgtgattgcacaaggcgaagaattccgcgagatccgcctcaaagccggcgagaaaccactctaccgagagatcaaccgtgatcctggcattcgcttccccatcaaagtcgacctagccctcccggcccacaaagtctcactactcattcaatctgagctaggggcaattgagtatcccgataacgagcaattacagaaacacaaattcaccttccagcaagacaaaagtctagtgttcgcgcatgtcaaccgactaatccgttgtctgatcgactgtcaaatcgcccgcggcgactcaatcgcaacccgcaatgccctggaactcgctcggagcttcggagcgaaggtctgggaccactcgcccctacaaatgaaacagatcgagcaagtgggtgttgttacagtccggaagttggctgctgctgggattatcagtatcgaaggtctggattgtgcggagcctcatcagattgagatggttcttagcaagaacccgccgttcggatcgaagttgctctcgagattgaaggagtttccgaaactgagggtttctgtgaagatgcttggaaaggtttgcaacttaatatggcgacaaatgtcattttgctaacctgggatataggaagtgaaatttaaatgtgtcaatgtccgattcaaggttgaagtcgcgttcatgaacgacaaggttccgacgttctttcaacgtcgtccggtttacgtgtgttgcatgatagagaggtctgatggccacataatcgatttcagacgcacaaggtaagatattcatccagttatctcgttataggcaaacgctgatattcttccagtgcgaataagctccaggaaaaactggaaattgaatttaccgctgacttgacgagtccggagcatgtcattatctgcgatgttatgtgtgatgagatcggtaagacctttgaacatgaacaaaaactattcgtgctgacaattatccagcggggacgtggagacaagctgagcttgaacctaacctgccatctcacatttttgctgctatacgggataagaatgccaaggcccaaattactgaaacctcgtgtcatctcaaggggaatttgaatcctaaagacgcagagaaaccaaagaccaacacgactcgtccccacggacgagatataaccagtgtcaagacaaagtcgcggtgggatgtggacgattttgatggcgatgacctccagctcgatgatttcctcgttgtggatgaacgccgtggcaaagctaaggaatctacaaagccacatcctgaacagtttgatgatatagattggttctcaatggattcaaccccaccgagcacagctaagagaataccgaaggtctcaaatccccgagaagaagactgggcggttgatatggacgagccagaggctgagtacgagccagtcagacttgcgaatggcaaatgggcttgcaaccacaaatgcaaagacaaaacaaggtttgagaatctttactttctttattgtcaagctaataacttcagctgcaaacatttctgttgccgcgagggtctggaaaagcccccgaaacccccgaaggtaccgaagcgggccgtccccgtggccccaaaagaagctggtctcaatcaaatgactatctctgcaagtatcacaaaggcaaccccaaccagtaactcgatttcgagaaacaaagtggccaaacaacgcgtcacggggtttaagaatgacgaccgtgtttcaaagcctaagaaaatgccgatgtcgcaggctgcaaagaagaatccaagtcgagagaagtctgtcctttcggagagggacaagaatccttcatataagagggattgggaaatgagtccaatgaatctcctctcgagtgactatggtgacgataacttcgacgatttaccgtctccatcacgacttctcgtaaatagcggaccagggcttagaacatcagtttctccggtggtgaatggccaggcaaagaaaaacatcacagatgttgcagtcattgaaacgaagcatacagacctcgagcctttgctctacgcttcacggtccgccgtcccgcaaaaagaccaaaccaagccatcaacccccaaacaacacgagataatcgagattctagacgacacacctccagactcaacaaaattgccaatgacgacaaaaaagaaggagtcttctgtcaagctgaacacgcttccactttcaacaaaagcagaccaagcccccgatctaaaacggaaggcgagtcaagtcgaagctcgaacagaagaccacaaaaaacgagtgaagcaaagtcccttcgtttcggctttgcagttccacacttcaaactacctgaacgatatacaaccactgaaccccgagcatcctgcgtctcctgtttctcctgtctctcctgtttctcccggtgctgctgtttctcctatgatcggcggtgggatagatttgactgcatcatttgacgacggaacagatctgcttgacgagttcaaggatattatcaaatttatctaaatgattgggaaatgctggccaagtggcggaactttttgttttccccttacgcatctctaggatttattttgcgtgctggtatgtatggtgctgggttactgaactggtgcaagttgcggctttacttttatatacactactgtgctatgctacattgacatttataattctcggcatgaaattatcctgagagaatttcgttgcattgatattctctaattttttgcaccctgaaggacggtgtagagctgtgattatagcataccaaccacaataaattaaagtttaattatctctttctgcacacatttcttgaatagtaagtacagtagttatcgtaaaaagtgtagtgtcgatctagacatccgtaacataacagcatatacatatcctagtagacattaacagtccggttgccaatatagagacgaccgggatttagggcattgtttcgcccatggtaagactgtgaatggacggaccaaagctcgcaatacatgggacttcaaactgtcccttcgttcttggcattatgaacttcgggtttgtcctcggggtagtccgtgtctgtccaggtctcccagaaacaggcacccttcttgagcgaagtgatagtctcccaaattagagtaaacacaaacaaggccatgatgattgacaacacgtcagttgcattcaggtggtcagccaggggcaaaaggatcgtgatgataccgactgcagggcgcatgatgagtcggaaaggctaggacaaacattagtgactggcgtggtgggatgcaagtaatagacggagggggcgttgacttaccttgtccaagatcaaagtccccgattcatcattggacttgtgcagcagagcaaacacgtacaaaaagatcatgcctgcacccagaccgccacaaaggagccagcgctgtggagcttcgaactctttctcggcaactgactgtgccgcaacatgtccgccagctagcagactggcaataagtggtagatgaatcagggcccaggaaaaagctgtataaaccgagtgccgcaggggtgagtggtatttaatgagccatcggcgtgggcatacagccaattcaaacagaacgcaataaccaatgtccaaacagctcgcagaaggcgtttattgagtccaactgcagcataggagccaacaataatcaaatagagaaactcgcccagcgcaatgatgtagaatgcagagaaccgatcaatttcgtgagcgatatccactgccgtcgaccacctgacgcgaaggagtttcttaccagccggcgagtagcacagaatccaaaccatggtctcaaccgagatagcgacagcagcagccgcgatcttgccgcggatcgagactgactcgaagtatagtgggatgtaaatgcatagtgacagactggaaaggacaacccagaggcgctgctgcggacggtggtggtagctggcgaaggagtagaatacgtgggcgaggttgcatgagattcgcgcgaccatgtaggatcccacggcggagcgcatggcaccgatctcctcgtcgacgagtggggcgttgttgccgtatacgaccagtacggccatgacccacagaatcaggatgcgctgtaggagatcgtcggtgtagaaggcgttcatcaactcgcgcagatcgctccaaacgttccatgatggcgccaggatcagctgtgagcgtgttagcttatctatcgcgtctgaaagtggatgggatagtggaggcgatggtggacccgatagtagaagggcggccaactcacaatatatttgaccagtttggcacctgagatgtcttcagcgagggtatcggcgaagttcgacaggatcgcgacatagagcagatcgaggaatagctcgaatcgcccggcttgtcgctcaccatcctgacggcgcatcaacttcccatcctcgaaccattgtagggcgcgtggttggtggaataagaaacgaggatttgactggggctcctcaggcgttgaggccgacatgactgtgcgatgtaaaagagatcgagcctagcaaggggattgaaaagcttaaaacgggccaatctcttggccccacagttcgtccccgcaaatcagattgcacaatttcggatatattatgtcatcaattttatacccagatcacatgaccggggaaaccatattatcatttgtcagcatatgttcggcgaacctgcttttccaaggctgttctattgttaccccgttagtttctagtaaattgcacatacttggacaattaacatcctctcaagagcttgtgctctctgtgcaaaatccgaatcatgaattcggcgaaagtttagcgaagtcgagcaatgcgaaccggcaatttgcaattccgtatctgagtactagtttgatctccttctagaacatgtggggctcggcggtatagagcattaacacccagccttttcataccattcaggcgggtaatctggcataggatgagcgggtatggggagaaaatccgtcgaatgtctcgataatctttggggtgattttgacgttttgtttcggctgaaagcaggtgagcattaaccgaggaatacctggagctccctgagacttacaagggatacttttggatgttcctccacgcacacagaatagcctctttctgcgccatttcatgatctgataaaggatccacagactccaagagaagggaattgaagcttccatcttttccatcaaatatccactgcatgcagaactcaaacaatcttgggtagaagcccgcagatgcccaatcaataaggcacaaggagccatcttcctgccatatgatgtttcgaggtacaatatccagatgacagagcacgagatcacagccctgtaaatctaagttcgggttatgcgcaaaaagccggctattgaaccactcctctatccggctaagactgtcgaaaaccaggtcttctgtttgagggaatagaaggccacgacaagcgcctctataaagtgatccagggatattatacctcaatgttgcgaaatgccccagcatgctggcaaccctctgtatagcgctaacgtcctctaaaggatcgatgacctttccttctataaattccatcacaatataaccccagtcttgctcgtcagcaaaaaaaatcataaacacgtgggatacgagctatgcggctgtccacaagctcataagctatcctttgattttcaaattcttctcttatcacatctgggccgcatttaacgacttgatgatcagagattctgataattcgtttgctgtattggctaacaacgttgccaggcaacgggtttgcgcaagaagcgatcactgaggctcgttgcgagtcttcgggacgcgacattcttttagaatggaagactaattgggagtaaaatatcataggacaacccaggtctggggattcaaattagttataaagatgataagagaatgtcttgtcttgttggaaataagaaatataacttggcgcggagcggggtaaaaaggggccgaagaatgttatggtagcccccgtttgtgaaaatctggaaagcgcgagtaaggagcggtgtaaagtagagatgcaactcgccgctaagtttgcttgttaatatggcgcctgggagcattgctaaaactatcattaggtacacagctaagagttcagggtccgtcaacggtagtgagaatgtgaggacagtcgttcagaaaatttcctagaggaccaattaacggctttcgcctatcaaatggaattttcgttcttaaaggattctttttgtttcattgcggtagtgaaatgtatgcctaggtgtatatacgtacatgcatgaatctcctactgtggcacgtgctacaccacgtgcagtacccggtattcggcccgccccggagagccgcaccgccttgcgggtactgcctctaggtacccaccgccctcaggggggtataagaaggtggccctgcccccggaacttccttttcttttctttcttcttcagctctctttgcctctggcttagatcaagtgtagtatctgttctattcagtttaatcgctgaatgttctgcattgcagaacgtcatgattatactaatttttggacctcgcgacttggcctctgtgcttgcatacgcctcgttgcactgtgtcactgggcttacactaccctcggtcgatgcgaaccctcttttttttcattaatcattcggcttgtccgggtgtttgaagaagaaagctgtagaagttccatcatgaaaccccgtatgcctctcgtatcaacgcgcccatcatcgactaacagatgcctttctctcacaatatgccagctagctgtgtcatatacctgtgcaagtccttacttgcaaacgaaccgtttcccattctctcctttgacgcactccataccgtgagcaacccgcttctcgacacggtcggcctctccatcgacgaattccacaccatcattaatttaatctcgacacagtcggtaccctccttcaacacatatcccactacacttccctgaactatcacccccacaatctgctactcgcgcagtcaactcccttcatacatcgcacaatgtcttcttcttctagcagctttgccaaactaaagctcctagaaatcattcgtcttagcccctactagcgaaaacaccttctctttgtggtcggccacatactcgtgtacactttcaacactcgtgaccctcaccctttcgagctccttgccagcaaacacaacttccgaaaacctgacagcttccgagtgaacatgtatctctcagcacctgtcgtgcactcgcggtacaatccatgcatctcataaaccttacaccaagatctcgcctgacgctaacgtcgcttcccagagtctttacaagagccttcatacttacagtcccggtctcgagaagtttcatagctcccacccacctcccctccacttggaagaccaatattaaaaagaagctaggtcttgtactacgccctataccgtcgggaccaccgccagtgcaaacagcctgcctatattcaattagaatttttgccatagactggctgggataagcaggccatcatggattaccaggaaatgtccgctggtcgtcattatcttgactccactaagtttcctatatcttatacctagaatcacatatatcatttcctttaattcaatagttctaataccagagatcttgcactgcattttctagcagacattatatctttacatctgtagatatataatgtcattgtcaccggcgacttcatttgccctaatagccaaagttaaataacaataaaggtctacaatttatgcggtacaatgtcagactccaactgctttgtgtttttgatgtcagattctgtgtctattacccagcgtaaatcaactcatgttacatcatggcaccttgacgtctctcagatctcccctaccacaagatctttccagatgacccacaatatacattattgccttgaagctatattctacaaacactgcgatgtatgtctaagcataatcctattctcaaattcttagtaagatagacgagaggacaactagtattgtaacacacacatgcttttctttctctgtacattcaacaaaggatttgtatatcgtggagccgaatcatccaatagatgcgggttcactgggaagatagcccagagccgatgtcgataacattatgtgagaatcgtgttgattaatggaatatacatcgactgggactgggaggttcgacacgctcctgcctaattgcggtgttgttctaccttagacattaggcataaactttttgtcggagtcaaccgtatgtgtaataatgggggtccaatcaatggtgtaaaatcgtctgaattgtcaagttcgtcccccgcgcggtgcgttggctgacgagagatgagaggcattgtttcgggcgagaggtgatgtttttggttggggctcccgatgctatttatcgtcgccatgaccttacagtagaattcgaaaacagactactccgtaccccttggacacacgctttctttcccggcgccccgctctgactgcactgaacctaatccagtaggagttggtctccaccaccttttgtccatgtatttctggtagatcgtcaaaattacggtgattacactttccggcattggacagacccgccttgccggctaaatgactcgagtaagctaagcggtcatgtggttttgcagcccagcaataaatcgtcccgccctagtgtgacgtcgactcaatttccctaacctatacctctctatgtagcatacgaagcgtattaataaaaccatactattttcgtgcggcagttattcgttatatctgccccgcctaacactctaaaggagcctacttgtataatacgcttgtcgggattgtcttaagctgtgactaagggcaaaatttggggataaaatagtaaagaaggaaaaagccaagtagggattcgatgtaagggtatatcggttgcctaatcttaattagaaatggtggtggtggttaaaatagtaatagaagttgtattgaaaacgagttgcgttgacggccggctgacctacccctgactaactaactaacgttaactatgtgataaagacgaggaaaggtatggtcacagtctggatcgtaagtggcttgaacagatattgtgagtaaaaacggagtcacgttcaacacggtgttgttgtttgtacggtggtcaatagctctaattttcttcggaatagattggaggaaagtggcgactagaacttcagctgaactgcggatatcttggaagagcaggaatgatgtgcggtttatatctacgtcatgcactgcagaactcagcgggttcgcttagggttagagcgatcaccatctcctcgggagggccgaacgccgcgaggaagaagaaactgtgggtcgtccgtccaatgaaatcatgatcggcatacaccttgccccttctagatgccaatttaggttgagttcttgccaagatcgtcaatactactgatcagatcttccgcccgtgtacagtagcactgcgcacattgcttcatacttcggagttattcgaaatcaaatttatcgatatctcggcaagttgcaaatttcactgatgacgtagagaaggacgatcagaccattttcatggctcagctgaaaatctaagctgagaacggaagctgagccgcccagatctgtctataaattaagctttatacccctctctcccactccagcatctaccatccttatcataaggtcgaaaaccacaagactcaatctaattcaatccaagccccaagcctaatcctctcaaaatgccagtccaaattgtgcaagagtacgcctgcttttcacctcaactccctgcttatacgactaaccctcatttcttcttttagccccgaggaagttttcgaagctattacggagagcctaaagccagttgttgtgcattactgggctccttggatggggggagagtcgccatttatgcctgttttcttgggggcggatgaaaatcgtgggggggaagagattgattttgtcattgtggatagtggatttattcatcccgcgcatagtccagatgagatgcccttaacggttctctatcatggcggtgaagaggtagattctgctccgtttgatcccgaagcagttgaagcactcattgagggagtataaagagctggaaattgggataatattatgctaggtaatatcattggtatattgatttatgacagcttatggctggagtggtgatttgacgcttagttaacaatactattaaggtgtgaagaggaaagatggtaagatatgatatgattggcacaataaactgtaagatagtatatacgtgaataagatagaaataaagaatgaaagtagatacgaaccactacttttgtgattcctttgactatcattctagaataatagtcttaaactctggggaagcctctaacccattatttgaaaagatctcttatttgatattgactcgtttttcaaaataatcccggttcttcgaaggtatgttagctttgctggaaaccccatcttaagtaaagctggtaatgaatgagacgcgcgtaagatagcgagattcacggagatactaaaaacatgcgtccctaccaggtctagctgtctacaccgtaagcacagtcttctaattataactactatagctgtggcaaacattgagtgcgggatggatggatcgatgattttattcactttgatctcgcgaacgggtgccatggtgcatactgtattgtatgaccacgggcgattcggcaaaggtggtttgtccaatgccggaaagtgtaattaccgtaattttgacgatctaccagaaatacatcgacaaaaggtggtggagaccaactcctacaggcattatccggtatatatgcgaatacgaatataagcgggagcgggcgggagcacgtgcctatagccgacacgtgctcctaggtaaaaattacgtcccgatccgcagagccgcactgtaccgcctttaagggtattgcccccgaatacccaccgcccttgggggtatatagcgaggccttcgggcacgagccctcttcctcttttctttcttcctcagctctctttgcctctggcttagatcatgtgtagtatctgttcttaccagtttaatcgctggtagttctgcattgcagaatgtcatgattattccaatatttggacctcgcgacttggcctctgtgcttgcatacgcctcgttgcacagtgtccctgggcttacactacccctggtcgacgcgaaccctctttttttcatcaactactcggcttgtccgggtatttggagaagaaatccatcgtccaataccccttctgatcttgttgtggagttcctttatgtgtcttgcccctctgcctctgggtcctctctaggcgttgcagactggataatacgagctctacgatggtctgtctactgattctctagactttctgatcttgatttccatgtctcttcgcttggcctcattctagtacccgtgggtcttcgcagggacccaccttggcgatagggaataattccctgcccggtcgcaatcgtcgcccgtaagagatttcacgtgccagtccaaccccgggtcatcatcgtcgcttccatggtccatttccttctttgattcctcgaaagttcttttgattcttcgtgtgttcttcgtgtcaaatatggtccgagccaagcgccaaaacactcagcctttggaggattcctctgtggcccccgaaaccttcaccgacggcctacccctcccgaagttgatcgccttcgacctagactacacactgtggccgttctgggtagacacacatgtcagcgcccctgtgaaggcccgcgaccacaactcgcgcgccgtcgaccggtacgacaaatcccccgattgacattatcttttgaaactactcagatctctaaccccgcattccttgtctcaaacagatggggagagtccttcgccttctatccggcggtgtcgtcaatagtctacgcatgcaaacatcgctcgattccactagcccttgcatcccgaacccaggcccccgatctggcgcgcgacatgctcaaatccttgcatatcatccccactttctccgataaccccgccgcgaacgctaagaccattcgcgccctcgattactttgattttatccagatctaccccgggaataagacatcgcatttctcgagaatccaacagacaagcagtgttgcttatgaggatatgctgttcttcgatgatgaggcacggaaccggaacgtcgagacggagttgggtgtcacattttgcttggtgcgcgatggggtgaccagggaggaggtcgaccggggtgtgagagcttggagaaagcgtaatggtatcaagcgagataccatggaggaatcatgaggatccttgatcgtcttatccgatgattcctacattgggggatgttgcgctgtacacttggtttgagattttagataccccgacttggaatttatgagaaattcggctttttatgcttcacagcaatccttcagtaccgatttgaatagagtaacattcaaagtacatcgtatacttcgacctatccatggatggagccatgcgtccagacattttgttgagctgactaagatattcacccccaaaggcggcgcgatgcagctccaaaacaggaacaccgtgctgtcataactagatctcctcgaaacacacctcctccaacacaaaccaccaacatggcgaccctcagacctccaacaaacacccaccgctcctcatcctcccacagctccggtccaccaaaagcccccctaaaagccgacccaacagcgacaatcgccgacacggtcatcttccaagggcgatacctcgtcactatcggcgcagggacagtcatccacccgcgcgcgaaattctactcatacgacggcccaatcgtcgtcgaggacggctgtataatctgcgagaaagcggtaatcggcgctccgccaagctcatctcgctcaccgtcaccgtccagaccagcaagcacaacacccaccgagtctagggtgtcgacgcctgagcctaagaaagagacatcgacgcggatatcatactttgttactgtcggcccgttggcgacggtcgaacccggtgctcatatccattcttctgctacaatcgaggctctggcggtgattcgccggggtgcggatatcggtgcgcactcgaaggtgtgttctgggtgtgaaattgccgctgggggatcagttgctgagtgggtggttgtatatgggcagggcccgggaatgcggaggaagagagctcgtggtgtgaagggggtgagtccggctgttgttgctgcggcgcaggttgcacagacgcctcttcctggtcctgcgccggcgggcaaggttattgaggatgcgaggttgatggttttgcagaaggagagggagatacttgggagaatgcttgttcctgctgctgggaggaagaagtgatttcaaggtgcctcgtcgatatttttttttgttttgaacttgcgttcttctgtatcggaccagatttcttggattcgtgtcttctagcagcttataccccagtttgtgtttacagtggttagtatatcggaggtcgttacaaggatggtgcacgaaatacctcgcaattgaactatatcaattgagagtaggaatataaacccgtaggaacgccacacattcagtagataaatacaggacaacaaaaaaaaaaaaaaaaaacaaaatagctttctgcatagcagattataacatgaaaaacaatacaccatgcggaataagcagacatagaaacccattcatcgacaggttcccgtcgcatttgaatgaaattgagaatacatcaatgagatagaaaaagatggacaatgaatgctgcctaagacgaggctccaccacgagcctgagggccaccgccgcctctctgtctttttccaccacttccaccatcggtggtagtgtcggggccatcatcacgagagcgcttgttgcccgccggaatgaactgacgagctgaagcactcagattcccacggttagcagtggggctttgagcctgagcgacgttattttgattctggttaccaccgcgaccttgtccgccacgaccgccacgaccgcgctggaggccctggccgcgctggttttggccctgaccaccttgctgctgctgttggtcatgttgttgatggccgaattgctggttaccacctcgaccacctcgtccacctcgtgcaatcggaagtccagactgaagagcgcgcatcagaccaggcgggtttccggcgggaggtttgctgggaagagaagaggcatgctgattttgatcgggttgctgaacttggccgaacggattggctggcgttgcgggctgtgtcccaccttgctgggggacagcaggtccagaagacgcagttggaggcgcggcttgctccggggctcctaccacagggactgaggcaggaacggaggcaggggccggggccgaaaccgggacttgtggcgctgctagtgttggagcaggaccagcgggttggactggtacaggtggcttagcagccggaactgcaattggtgcaggccgagcagtctttgcaatttcccaaacttccacaacaggcttttgtggggtctctgtggcagcttttgataccacatcaatcttggcattcgcagttcggaacctggtgtcaagcatgctgagacgggcggctgttttcttttcgacaagttcgactgccgagttgaccttctccttgagttcattctcatgggccttgatcaatgcctccttttcctcggtcgacttctgctgtagtccagccaatgcggcttcattagcaccggaggaggcttgagcttcttgttggagtttttgttgttcgcgtgccacttgaccgcggatgttgtttcggacgattgtgcgaatagtctcatgcttcgcgaccagctctcttgcttgagcatctgtcaactcaggaatagtaaacccggcaagctcaaacgtctttgacggcgttgcaggggttgcatccggggccgcacctggtgttccaggtatggattgttcaccggcggacagtttctcaatttcttgacgatgagcagccttaacttcgttcagcttagagttgtacatatccttaaggcggtcagcgcgttccttgaccttcgcatcttgttcactagcctgtgtcgctagaagtccatccttctcggcaagagctgcctcgagtcgctgtatcttctgctccagggcttgtatcctttgaatgtcactaggaccagggatttgaactgtcgcggttgggaattgtgaagctggggtagcgttgacgggagcttcttgttcggcagctggagcaggagcaggagcaggagtaggaataggagtaggtgacacattggctggcgcctctgccaccttggttttcaacgcctccaattcgttctttgtagtctgaagttccaattggatgacctctttctcctgcaacgccacattgagctcatcctgcttggccttgacacgcgcgctaaggtccttagagcgtgccttgaattgctctgtgagcttggatcgcaagtcttgcgcacgttcatcagaatgctgcttgagctgctctgggaactgggcgatttgagcctgaagtgactccatctgggtttggagagcttcccgctcggacacggcctcgttcttctccttctcgagactcgagagcttctccttcaactcttgcatctcagtaggatcgacgcggtcgtacttttgaaggatattttgaatacgttgttggtatcggtcacgatcggcctgtagaagctgcatttctccatccttggcttcactctggctctccaactcgtggatcctggtcttgaggggttcgatctcctggaccagttcattctcgcgggcgatcttttgatcacgtacggcctcggtttgtttcagttggtttctgagagtggcgttgctttcacggaaaacgttgagctcattgatagtatccaacagcttactgtgattcaacgcgttgtgatcgctgtcggccgcagcacggcgctgctgctcaagcttcaaccgggtctcatcaagctgcgactgagtgtagtcgagctgctggttgaggcgcttgctttcctgggtcgacaggtggtattgaacctcgacaatttctttctcgcgacgcaagaacttgataacctcctggaggccctcgaggttgggggcggcctggtctccctctgcctcatcgtctgaaacattcattcggtcccgctgtaaggacgaaatctggctggtgatgttttcaagctgcgtgtgaagcacagaattctggtgaagaacctcctcccgacgcttctgcaattcagaaagctcaccctcgtacgtggctcgctgttccgcccagctttcctccttctgagacagatctgttttgtagccctcagattgggttcgcagctcagcaatgtcgagcctgagctggttgctctctgcacgaacaacttgtagattcttcgctgcctcggcgtgcttaacaagctcggtctcatagttttgttgggcatgcttggcgatttcggcctgcgcattaaggtcctcctgatggtattgcgcagcagtgacatgtcgttcattgtcggccttgagacgagtaatttccgactcgaagttggccttctgctcttccaggcggcgggttgcctccgcttgctcttcgcggagcttggtcatttcagtgttagaggtggacagttcagctgagatttcctcaatgcgagtttcgaggtcctgaatcttagtattcttctcctccacgagtcgatcagtctcttcgcggtattgttcctgggtctcggtggcagactctagacgttcttcactggcttggctgatggcctggtagtcttcggccagttgcttggcgtgttctagctcgcccttggccaattctaggtcccgtttcagttcggagacttcgattgaaagttcctgctcgcgagaaaggccacttccttcaccagactcctgatcctcggtaggaccctcggtggtgccggcagacacgcttggtcgcgaattcacgacctgcagacgctcttcggcgctcttgagctcgactgcaagctcatccacgcgggattgtaagtgatcccgggtagtcttcgcagcaaccagctcttcgcggactgcacccaagctggtgaccaaatcgtcaattcgtttttgtgatgtctcctgctcgtactcccggcgcatgctggccttcttagattcctcaacttcatcattgagcttgcgctttgtcgattgcagttcgctttcgagggactcgacgttggcttggagtcgacgtcggctctcggagtcgctatgttcacgctcgttgagaatggtttgcaggtttgcgttcaatgagtctagacgaccgcgctcgttacgcaaattttcggtatcatcgatgagcctcttctcgatattcttccaaagggccttctcggccttcagattggcattttctctctgaaggctctcaacaagacccttagcttccacaaggtcttcagcagcttgctgggtgcggagatcctgtcggtttgcattttcgaagagagaagaataccgcttctggatttcaacgttctcattcttgagcatagtgaagttactctgcaaaagctccgcacgttgggaagcagcagcaagttggctgtttgaccgactgatgtcagacataagctcactgttcttacgtgacagctcattgacctgttgccgcagtgctttgtggtctgttgtcgtttcttcacggaaagtgtcgaaatgggcttgaacttttcggagcaactcagcgtagtcgggtcctgaagtgtccatggctccttggggagcagtaccaagaggcatggattgtgagaagacagacgggtcgtcgatggttggctttctgtgcatgagcatactgcggaatgtgtcacgctccttgacgtaactttgcatctgtgcgctgagattcgcaatctcatcacggtttgtctgcgcacggatccgtaactccttcaactcgtcgagttctgcacgtcgcgtagcttccttcgcttgtgcctcttcaccctcctgcttatcaccaagttctctcaacatacggcggagagtgtggttttgatcttgtagttcgtgaagatctttgaaagttgtgaggtgcttgctgataaagcgaccagtttcattgagatccttcgctgactcctcgacttcaccccgagcaattttctcaagctcctcgcggtcgtattcttcgccatgttttgcgacagcaacttctaggacaagaaccttgacttccgcactcagatcgcgaagttgctggcgaaggatatccccctcgcgagctaggccctcgacttgcccttgccatttcctggcttccttgagggcggtatcccgttccttcccggccgcttcgaggagagtagacatttccacaacagcatggtcgagacgcatttgttctgctcgtccctcctcaatttcgggtctggttgaatcaagttcaagaaccatctcgtcaacggtattccggagctcctggcaggttctctgctcagctgcaagagcggtgcgcattctgtcgtactcggagtacatctgtgtgacattcataccacccttaccacgagatgtccgaggggagaacgagccagtgggagtgccagcacgcatgatgcttgatcgtagaggtgtactaggtgcacctccattaagagagacagcggggcttgctgaccttcctctggcaggttcaaactcaagctgggcaacaagtgcctcgagttcggcaattcggcgctcagcagctcccttgtcgttggactccgtctcaagctccacacggaggcgtgagatttcctgtgctgcgtcatcctttgtcttttcgagagctagttgacattcttgcacccgttgcttggccgtctgggcagcagatccttgtagctcggccaatcggttggagctgtcaagttcaatgcggaaggattcagttgcctggatggcttcctctttcaactgatgaatgctggccagagaagtttcgtatcgctgctctgtttcgtccaagcgactcttgagcgaattctcacttcttcgaagagagtcaattgtcgagtttgcttcttcattttcacgctgaagctccgagatccgagctcccttttctttgcggaacttgatgtattcggcggattttgttttcagttcggtctcgaaccattcgttgttctttttagtgagatccagttcttgttgaaggctctgttcgcggaaacgcgcgctggcagatgcggcattggcactctggagactttgctccgcggtggagagttcacgtcgtaattcgatggtcttcttgtgctgaagcgaaagctcctctgccaatttatcataggccgcagatttcgattcgagcaagcccaatgtgtctctgttggacgcctccaaagatgatatacgcgctttcaaagatgtagtttcggattcgttagacgtggacgaggatttcagtgtagaaatttctgtctctagtgaggaacgcgtagtttctattcaatgttagagaaaagctcgtcagtactgaaaaatatagagatatgtaccagcttcatgcagctttttcctcagatctgcgacctccgcgtgtcccttctccacgctagctttcagaaccttgaccttcgactcattgctgcgcacagaattttcaagctctacctccaagcgaagcttgtcggacttgagctcgtcggattcatgggcctttttattgattgattctaaaagttgattgacaagctccacagttggggcctgccttagggtcgtgagagtcgattcgggaagcgcatagtgggatgataggtagggtagttgaatggcagtttcagccatgttgtcaaacgaggaacagcactgagctgtcgtggcgaagaaatcaagaaaagcaagtatgagcggccctcgaggactggcgcgccgtgtactgttcagagacaactacacacagcgctgggcgagagacctcaggtcatgacgatgtggacaaactagatgtgtgtcttccgagggagaaaacgaaggattgaatgatatagtaattggaagaaatggtggtgagatgacttcaagggcttccgagatccatttccgcgccttggggtgctgagctcttgcacgtgacattctttgtctcgccttcaatcttttaatagccactctcatcgaagcttcactacttgtctaggctgtcctcattctctacgcagctctttttgggtgtattctcttcttttctttcggataatacttaccaccggtacctttgccaagccctgtttgaatcctccagctcgatctggtcaaaccgagtggctaccacctcagctctgtcccattctccccttgaatttcagcgatctccaatccttcgtcgcaaccatgtcgtaccttcagaatcagctcaaaagcttcaacgccagtgtcgtggaatcggcaaaccgcatgcctacgcagcggcgtgtggtcagtaaccaaccgatctctggcagcagttctcaggtcccatcgtccacaccgaccccttcatccactaccgaggtcaaaaagaagcgtcatgacccggacatcgtctactctcaaccggccaatacaggcacgggcaaagatatcatgacgcaggtgctgtttgcgatcgagcacatgaagaacaagaacattccgctcaggtactcggatatcatttcatacctctcactccagcatcgtgctcatgaccagggctacgtgcaggctcttcggagcattttgcagatgcatgagaaggttgagtttgacccgagcggcgcgaacggcgagggcacattcaggttccgcccacctcacaacatccgcaactcggagcaacttctgaaattcctccaagcccagactactgcggcgggtatgagtgttcgcgaacttagggagggctggcctaccgtcgaagaagagatcaaccaaatggagaaggagggaaaactactcgtgactcgaaacaagaaggatgagcatcccaagatggtgtggcctaatgacccgtctctaattgaacacttcgacgatgagttcaagcagatttgggacaagatcaaagtcccagatgtgaatgtagtgaaggaagagttggacaagttcggcatcacacccaccaacaagaacaaggtgctcggtccccgggtgattgcgccgtctaagaagtccaagaagccacgtcgaagtggcaagaccaccaacactcatatgacgagcattctgagggactactcgcatcttaaacggtaagtcagcaagggtctcactttactgttgtcacatcagaagttgccttgatattatcgtgctttgcattgctttggcgtttgggagaaatgcatgcggcctcattctcaccgcatagaaactggtttattactttgacatttgcttcgacagcattgacatttgtacactacacacgtagaaaatgatagatacccaaataaaaaaattaattgattccttacaaccctagctacctcagattccaaagtttcttcatgtacccagttagtccaccatctctctaccctcatgctctcacccgaagacacaagtctataacccgaatatatgcatcaattcatccaaaaaatgtatccaagagaaggcgtagtgatgtacaaggtaccccaaagcacacgacccaacaaaagcgatctgaatataacaacccgaagatcaaatgcaagcccccaatcattgcttcccattcgcagcggcaccagtaccgtcacgacgatccaagtacaccaccaaatcctcaatagtacacaccttaatcccccacttctttccaaatcgcaagcatccatcccgacgcatcatgccattattccccccaatctccgcgacgccctcgacagtctccccgtcctcaacaagctcggcaataacaccagccggcgccttaccagcaagcttgcagaactccaccgcggcctcggtgtgacccgtgcgctcgcgcacgccgcccggacgcgcctgcagcgggatgatatggcctggccggcggaaggagtcgacctgtgccgtgggcgaggcgagcgtgcggcacgtcagtgcgcggtccccggcggagattcctgtcgtcacggattcgtcgctcgagtcgatcgtgactgtgtacgcggtgcacttcgggtcggcgttctcggttaccatttgtgggagcgcgaggcgggtggcgaggtccggggtgatcggggcgcatattaaaccgctgtgttttagaattgtcagcaaggtttttggggtggcttcaagtttgcgcgtttgtctttgagggtgcgctattgcggggagggaagacgggtttcgtcgctgtcttgatcgggtgggtttcgtacctcgaatagcgcaccaggaaggccatctgggcggctgtgatggactcggcggcaacaattaggtcgccctcgttttcacgatcttgcgaatcgagcacaatgatgaattcgccattctctagtgtagggctccgttagtcgtttggtcgttatttggtctagtcggaaggcgccacgagtactgcatgctcgttgtgcatgctcgttgtggtgaaatcggtttctctgtaaagagttcacttactaaatgctgcaattgagtcctcaatcgagtcgaattggtgtgcgatttctgttggtgaaggcattttgatttatttttgcccctcactgcggaatttcaaggatgggtagtttgagatgcacggggttgcaggcaatatgaataagaagaggtcgaacaattgatcaagaaaagtaatattcggattggcctagaatcaagaaagaagaagaagactgaagactgagtcactggctgacaagaacattagaaatgcccgtgatgtcggcgcgggggagccgaaacgcggaccgggcgattgctaagcctcggagctccgaggtctatgaatgtcgttaaatccgagtttcttcccaaattgtagcatattccatagattactgcccagatattggcatatactcgtgtttccgacacatcagcccactagaactgggtatccggatgcagcgggtgtagagaaactacaagccaaaactttgactccccatccagcggacctcatccgcctgcctctcaagcgcacggcgcatataatccccataccgctgctctttctcccaatcatcacgccgtctatgtcgcatctgttcacgtgtagcttcatcgacctccgcatgcataaatacatcatcatcctcgtcaactgctttatcatctgtctccatctcataatccgccggaatagaaaatctgagacgaccaatgcgctctccagtccagataaggagctcatcaccagtaagatccccaccagtaggaagaatcttgcgagctacctcgttattccccgtcgattgggagtgccagagcccacgcggctgctggtcttcttctgtctgtggagttggctgttggctgccctgaccgaatggtatataaggctttgagttattgatattccagcgccggacttctgaacgaccgtctcgctctgtccacttgatgttgccctcggcgtcggaaaagacgatccgattcccatgcgaccccacggaaagtagtttggaactcgcggcgctttggcggttcttgtattctgggttgagggtggatgtcatgttcgaggggctgtggtctttttcgggtgctgatttgagattatagagttccagcgagcctcgtccgttatagtctccgcatgctacgacagaatgtgactcagggtagatggaattcgagaagaccgggaatcgaggcgctggtaccgaggcaagactacatagtcggccgccggaatggactgtggtctgtagctgagggaagtagcggcggtcataacataggatgctggggaagcgccctgcaaggagaattgtattcacatgaggagctggcggatgcaggatagaaagagggccaggttggaagaggggcgcgtagttggctcctttatctaagggttctggactgcgtatgcgagtaggtgactgtccgttggattgcagttggcgtaagggcgaatcagagtgggcaaagatgcctagtcgggaagcgtatggcccggctacctgctcgcatcgcaagctgattgcctcttcctcctcgacggctgacagtctggagtcatagatctgcaggctgagtgtagtggctagtgtcaatggcactgagtaatccgtctcctgagaaagggcaaagatcgaccagggatagcgctgctgcgaaatcacttttaatgtttccaagtcaacttcattgaggacattcccaactgccagatacgctctttgtcgcagagaatccacgctcactccctcgcctagatttataaattccagcgaagtcttggagggggaatgatctcgacgaccagacaggctggccatgagaattccgggctcactgatcccaaggatcttgcctttacttgctcgagagtcagctgagtgtgaattattcaggtcccagatgcagacgctgccatcttcaagcggggcaatgatcttgttctgactggctgaactccagtctttgagtagtcccatgcctttggcctcataggactggcctcgtttcccttcacttttgcggaccgagggctgctcaacccaggataaacatatgggcccgtgacgagcaatgtattccgaataccagtccacatgctccccctcggttgatgagtcccattccgctgccgccctcgccctttcaaaccaagaccattcctcatcagagtctccgttcaccggcggagcagagggctgaataatatcaagcagcgactcctgccccagggtcgtcaatgagacaggaacatcgcaaatcagactctccgaggatctggcagcggagcgggcagcctgccgagcagcctgtcgagcagcccatgactgctcatagcagtgcaatctccattgagtattatcgcgggcgaggtcaaagaattttttggaggtggactgaaggttgaccttttcgcgtggagcgaggtctgtttatcgccgagttatcagttctccgtcgaaatggtgcggggaaggtccggggcttacggtcgatgattttagacagaatctctaccggcagcttatccatggagagggatcaagagcattgagggcagtctcaggaggtaaagtcagccacagggatatcggccttttgttggagattctagactcttttcctgtcggctttcctccgcaatctgcgctccagaccagaccgtcacgcggattcaattcgcatgggacgaacgactggactagatgcagaattgatcgaagtacatgtacgtatgagaatggtctttcatacactgagtgatgacgtctggagggcgctgttgagataacttcagacccgggagacttttccgggtatgggatccactggattttatagaatgactctggagaaagggagaacattctgatatattccacggcacagccacctctcgacaacgatgttaaactaagaaaatgcttatcgttgacatggcagtacgcactcgtgttgttatatgtggaaaatacggaatatccttgccaaacagatcaagatacgttaatatattgttgaagcatatccatccatcttggaaatagaaagtatttgaatgatctgaggccaaactccagcccagcccaatttcccccaccatcaatcagtcataactcgtatatttgagataaattatgtaggcaaaagcattaaacaaacagaagatgacggtctatagaggcaagtagagacacctctactcatccggtctaaagacggcatctttgcaaaggatcaccacctttttaaagaaacgtcgccattcaagcggatcacctttgattttgacgaattccgcttcaaataacccctctgagacacactcaatgagcactttaccctggagtggacacatcctaccatccttggcaatcacccgaatcatggcagaagtatctccagaaccaacagcagggacaatcggaactggaacccccagtcggtggaatgcctcacaaatgagaggcacgagaagcttgagctcccatgcagaatagaaacgtgtcattgaacgcgaagggataatatcctggaacctttgtgcgttttgagttcggctcataggcactgaaggctgctgtgagaactgcgacatagaaggctcatcttcgaggtggcccgccagtgctgcatcctgagaggcaaacttcttcccaaacggctgggttgaagaaaagacatcaccattctgtggactgtcccagtccatcaacataccaccgcccagcatctctggctgtgtcgaggagaagcctgaagttgcgccgcagtcatccacatccataggatcaaagctgcgactcgaacccttcccagatcgggaaagagggtcttgactgaagtcgatatgaagcgattcaaacatcgaggtggcaagattaattgtatctctcaacttgccatcggtcgagaggtatttgtttgcacgagtgtaccaaggatgtcttcggacatcctctagcgagaatcgttttcggggattcactgtcaacatgccacgcagtagtgataatgtagcgggtggtaacttctgccagagctcatcggtggtccgcgactttgttgcaacatattcgtgatactcaaagctatcgtctgtcgggctatcccacggcgtgtttccggccaataggacgaaaagaacgatgccacaagaccaaatgtcagctaggtccgggtgatacccagctcctttgttctgaccccgactactgctgctaattacctcgggtgcaatatatggagggctgccacagaacgtggtggagagtttccgcgttcctttgtattcgaacagcgccgccaaaccgaagtctgcgatcttgagattaccgtcgccggtcaaaagcatgttctcgggcttgatatcccgatgaccgacgcccttggagtgcatgaagctcaccgcgctgataagctgggagaaatagacatgcgcaacatcctcgcccacgccctcgtcggcctcaatcttatcaaaaagatctccaccttcggccaattccattgcgatccaacgccacacctcatcctcgcctgtctgatagaagctgataatattcccatgacctgagacatgtctgtgtaccgtgacttccagttgtaattgtcttgcgctaattttcccatgtcgcgcggcgtaatctttgtggatgtacttgacggcgaaaacggggttgtctgaatccaacgggcaggctttcttaatgctagatagattcaaccgagttagatctagtgcttaccatggatctcgttcttaccatgcataggcaccttggccgatagtcttggacacgatgcgaaacggcacatcgttcgggagcggggccagctgcgaatgttgcattgcgaggaagctggcagggatttgagtggatgcgatcggatggaacggtgaaaacacgaaaggacaggaagtaaattaagattaaaaaggcataacgagtgggaaacaaaataagatgagatgtcgcgtcgaagcaagggtagcgagacgcgggataagacgcggaccactttatcctgatcgggtagtctgttgacaacattggaaagtcacaatacaagagggcgagggagggaatagcttcactttgtctggtatgagacggctctatactgcatgtgcaactatacaatgctctattattatactacgatatgctattaataccttgagcctgcagacccgcagttgatttgacgatcgcactaatttctagtcgattgtttgcttatattttgaactgtccttgtccttatatccagttaatatgactttgattctatattatcgagtataaatagagataccttcctctcaagagccctagggtgcatagagtgcacatgtaaaattcacctaagcggggttcgcgttgcccggggcgtcttaagcgccgagtaaacaaaacttctttttttccttcttcctctttgttcgcgtcacaaattaaatcccctccattctcacctttcatcgatcctttctaaattttcgttacatcaacctccccgtgggtcattgttacggatccggtgtcattccaaaccctcctgctactgttactagcatctagcattccacaacccggaatccacagatctcttactactatttcttaagaacctcgattgcatccgctctcgatccacaatggactatagtatggaagatacacagaactcggcgcccgaggcgcagcaagccagcaagctgaactcctctggtcaaaaaagcgacacccagagcgtgaccaaacggttcgcctccccctccaaacagtctacaaatcagcttgctctttgtggttacatatagctaaccccatctctttgatttgtatagcctgcaagccgagctcatgcaactcatgctctccccctcgcccggcatctccgccttcccggacgcagacggcaacctcctctcgtggacagcaactatcaccggcccgaccgaaactccctacgagggcctcacactgaaactctcctttgcattccccaacaactacccctactctcccccaacagtcctattcaagaccccgatctaccaccctaacgtcgacttctccggccgtatctgcctcgacatcctcaaggacaagtggagcgcggtctataacgtatcgagtgttttgctcagcttgcagagtttgcttggtgagcctaacaagtaagcacctgcccacaccctttataacttctatcatcgctgacattgacccagtgcgagccccttgaacgcacaagcagccgagctttgggactccgatcaggcggaatttaagcgccacgtcctcgcccggcaccaggacctggacgacgaatagaccgttggattttatattttttttctcattctgcatcggcgtcggttggcccgtcgcccacttcattggcggtgggatcgtgctgcaaacgcataacggggctggtttgcgccttggagttgttggtttacttggctatgccctaatttatcttctatcgttattactagtacctctgaacctccgcattcaggtacaagcgtgaggaattcttgctcttgagatcctcgggcggttccctctcgttttatttcttttggtcattcctcctaggatggtagatctactaattgtcgtgctgttgtagatcatttgatcttgtacacgcattcaagattctacactatccgcttaagtatataagcttcgcttgtccacacttcagtatatagttaggggggtgtactttatatcaaggacagagtcccactactaattctcgtacaaccgtgcccaagtaattcccccttaaaagcgaagaaacaaagataaacagaattaggaccgattcagtccaataaatttgaagtcgacgctatcagaattggccaaccccagaaataaaataaaataatacccaaacaaccaaataatcaccccccaaattaagatgtcgtggaggtaccgaagtactgcttctcattggtaatcaacaagccggcaatcgtggcactagtgaaagtgctaatggctccggtaaccatagcactaaatgcaacacgggacacatccttaccgcgaccaggtgcaatctgcgacaggacaccgatctggttaccgagggagccgatattcgcgaatccacacagtgcgtatgtaacgataaggcgagagcggtcggagagatccttgtagtctgcgttattttggagagcgtcgtaggcgacgaattcgttctgtggctgattagaagagggaattattgtttattaagaagggaaacttacggtaacgagcttggtaccaatcagttgggcaaccttgagtagatccccgtcccgggagacaccgaggaggaaggcaatcgggtagcagatgtatccgacgatcaactcgagggtcagtggggggtcgttgatgttcaggtatcggccccaccaagtgaggaggccgttgactagaccaatgagagcgatgatgcacaggagggttgatgcgatcatggcggcgatcttcagaccgagccaggtgccgctggtgaatgcgtggagggcgttggcagagcggtgttcgtcgtcatcggggaccacgacacggcctgcagtaagggtttcttcctcttcgggccaacgtagttttgagactgccagtgaagcggggatactcatcacacacgcgctgaccattgcctgtgggttgacaccgatgctgatataggcgatcaggacacttccggcgatggtggcgaagccagagcacatgatttggtgcagctcggccatggtaagatgggcgatgaagggacggatcagcatggcggattcaccctggccgatgaagggggatgcggcggcgacaacggcttcggcgccggaaacgcgcatgctccagaagaagaagacggcgaacttgccaatgaaccactgcaggatattgaagtagtacaagagctggacgaaggcgacgaagaagatgatggcggagatgacgctgacaatgaagaattgctgtggggcaaagcccttgtcaaagtagtagaaatcctcgctggttaggaatatgactccgtcggcggcgaaaccgagcagatcagtggctaggcttgagatgaagttgaagatgtcgtatcctgcagtggtgcggagcacgaacagagcaatgatgaattgcgccagcataccgacaatgacagtgtgccagacgatcttcttgcggtttcgagatgtgagccatagcccgaagatgaagaccaccataccgaacagactgactgcacggttggcacgggtgttatcctgtgattcttcggaaacgaacgagccaacaagaatcacagcgatgcatagcgcggcggcactgggtgttctgatcttctcgggaatgaggcgcacgaaagggtgagcggtacgcccccagacccagtgcatgggccttgacacgacagtaatggggacatagaagaagattattcgcagcgtgatggcaagatagagcaggaatgggatgagccatcctatatcatgtcggtgtaggatcaggccggcaatccaccaactatgtgaagagtatgtgtgagcctcgtgttgagtccaggatacagtagtaggatcgaagtcttcacctacccggtaaacagtagccagaccacggcatggaatatatgtctccattgttttcccacacgacgataccaagtgcgcttaactgggagagtctcgccggcttcctcatcgtcggagttcttcctgccgtggtccagaggtgtttgttcaggcacgattcctttttcaaactcgacatctttcgagtagaccacttcatcctgacgtccctgttcggcgaaggcggtatggtggtgatgagcatggtgatgctgatgctctggatccagcacaggatctacatggtgaacaacctgcgatcctgctggatcaacttcatgggttttctccatgacgatgcccctccaatcgcaacggaaggtatgaatgtaggcgccggtagcaaatttacaattaagagtgaaactcaaaaatacctcgagatttagaccgcctgtgattgttacccacaaggaaagttgatcttttataacaagtaagggcacagatttagggatctcccattggtattgtttgaccttaaaaacctgttggtttattatttaattattggcatacatattacattttctgggggatgagagataaagaacgcccaccaaggattagaacaagacactagcgtcgggccatctttccttctcatcctgtttggctggaagaatggccatgaacggattgaccgacggtgtacagcggagatcccgtctcgcctagagccagctagagccacctgcagccaaatgtaaccacattgacggcaaagatgataagggaaggtagcattatcttgccacggccacccctgtcgtcttcattgattggtgcaggtcaggctaacttgctggctaacttgtctcaaagtccaggaaactctctccgcaccgggtagttgtggatcaacatgggtcgtgtgcttaatttcccgtctttccgccgacctgagattgttgtagtttctccaggggcgcgtgatacccgagcgcttgagcaagggattggaggctgaacgtgaaaagaaacatatgtaaaacatactacacaacgtgtgtggcctgcattgtgcgttgtttcaaactccaccgatgtctgaatttgcttcataaatgtggcggtttagcgtttaaaaaaattggagaccagaaaggtcgataagagcagaggggtccgagatacacacgcgtggcctcctcagagataatcccccatgtacgaaagataggcgcttcagaagacacagcttggcgtccttggtcatggaaaaacgtgtgatctagaatagcttccaagacctctcaaggttttggtatattagaccattctgtgattgtcacctcgtggcttgggacgttggaagtcttcggggctggactgcggagcacgccgacagttacgtaatcacgtgagcccggggatccaccggactaaagttgaatgtcaaccatggaatgggaagggcacatccacgggtggccagctgccgcgaggcataaatctatcaacaaggtatgttgtacatgcgagacagcgtgttgggtaagaacatatctctggagactgtaaacagcctagtatagccgctgtggttgactctcaggcaatacagcactgtatgctttcaaggacgtaaggttttactgggaaacaaaagagaacaagagtacaaaattctcgacagcgactcgcagtccagaaggtagtcaagagcaggtatggcttatgatctagttaccaactaagtcactgggatccgctggctctactacactgactttgatacttaaccaatgaatgcttattaagttctcatactctttctagtttcatcaataatacaatcagcattctcgccttctaccatgcacctaggcatctacctatttggatagcggtggctgggaaacctgaatctatccaattacccgaacgattgcagaaaagagccactcatcatgcctacagagaaatgtgtcacccacgttgagtgactgttcaagcgatctatttgttatgtttactttgatatccggctatctaaaaagcgtcatataattcgagtcataacagactttgctacgaatactctccatccatcaagactggaaacgagatcatcttttccagtgtaccgagacagagcgagaaccctactagtcagggctaacgtcactccagccgtaacaggatccagctcgccacatgcacatgtgttctctgtgagtatttcgagatgattgcttgtaaagagaatagacaatagattgaaaggcatttaagtgtcagatgaaacaaaaatgaaaatgaaaagaaaaaggaaagtgatggtgaaccactgccgagaagcagtcaattggactagttaactaactaactagttagttacggagtagttatagaagcattcctgaggcatagatagcaacgcagacaccttcaaccaccttcccttaccttcccttcttagtagtcaccccatggtgttctctagcactctactactcccagtgacggccctgctctcatacttgtttcgcaggtagggctgtcagtgcccctgctgtccccgttgcagggtcccctcttcagtatgtgttttcttaccaacgggtcgcacacgtggttcgaattgttcaccccacccttcatcactcatcctcttttgcttctcctccttatgaccgttattccgctggttaacaacagaggttcacaggaggatccgaggccgaagcaatcttaagagactttcgtgacaagatctgaaatgtttgtatcttgagtgcaaatctcgtttcgtgtagagtggcgctgttttgtgaccgacgtggaggggaatcaaggcagatgtgatgctatatgcttcaaaatctgatgaagatggaactggtcagcggaactaggtccagtcaagctcaaacatacacactgatgggatgtgactgacgaggtgacgactctcttttgtatcgagtatcacggcgtacacttcgccgcaaatgtaaggccgaaaggcaatatttgctgcttaaagcaatcagactgcgagcaaggtacacgcaatctgaagagctgtactagaaaagacagggcgaagccgtctctcggtggatgtttgaaggaagaagaccgagaagaaaagtcctggaaatatctgaagtaggggagcaaacagatgttagtagggccctatggctactttcagagcatctagtacgcactgagtttatctctgaatatgttaatttgtttcgatagtgaacactttctatctttcgctttccaggagtccccgagaaccctacatgctaagacatcatatcattcaaattccaagacctgtatataactgtaaatggccattcatgatcagtacatctttatattattgtagacacactcgggcatacgatatccaatagacaaaggttcttaagtgcagtacttagtgaacttgttgatggtaccacctttaacacacacaccggtacagcaatcgccagggagaaggcacgggctgtgagctagtatcgcatgtagcgttagcctcgtattcctaacactctaagaaagtctaggagaggtatcatgatcatgatagaagcatacttgatctgcagcgcttttcaagagggttggtgtccaaagcagcttcggggtttgggacagcagcagcattggcaaacgcagcaagagcaacaacaaggacaactttgaagaacttcatagtgatcttatcggcggaagaagaaaaaatggtaagtgagatgttattagaggaaatgagcttctctttatacattttgatctgattatttcctggcccccagccagcaggccatacatgcaggatcggctatgttgtcctaatgaacttgttcgagttatctgatcttacgccaagccgtcactctccttcgctcggttgcggggccaccaatagcatcaagttactgaatccttcaatttatgcagcttcgctcgattggctctaaagaccgtacaacaaagctaagcatattactcggcagtaacgtctactcttggagcgtatttctagacggagagatttccgtaggcccccaggctatccgggcgacgattctgtatacgagagcttggtcaccttgcttttctcttcgccttcttgaagcctatatgcatagacgagtaatattttactttcttacggcgccaacttctatgcagggtattttggaaggttgaaatatccacgtctccatatcttcgtgagatgcttcttttgtatggcgaagtggaaaccgtaaactcggaaacatggctgatcattgcctagtctaaaagacccgcatagtaccatgtggagaggtgttaccttcctaatccgaggatagcgtactagaagagctattttagcaactgatcacattgtacgttcgaaaaatccactgccagtcgtgatgagaaatctcactatatgaacagaagcaatggagatgtacaaacaaacaaaatcataactgactggtgggtgtcttcttggggtctagatttacccattagaacaccacacctttgacctgagcaaccttgttcagattgatattcttgatcatgatagtccacgcaaatgccagagccatcacccccacgccagcagagagcatcctaacttgtgtatagccgtacgctttctgtattgccgttctcatcggagtaccaggagcatagctcagctgtgtctcgagatcttcataaatcatgtccaggtctttcaagtctggcagataccaagtaagagccttcttgtaagtgttgttccagattgccatagagatagtaagacctgcagaatctccgatggtaccgaccacgttgagcaaggcgagggctgtagcaacatgctggtgatcaacggcagcgagaatagatagctgctcgacaatgatgaagatcgatccgccaatggagatgaagatttgacacatgacctggtaaccaacactctgaccaggacgacggaagtagatcatcaaaccctgggcaaagatgtatagaggaacggaaatgtaaaggagccatttgaagcgaccagtttttcggatcgcccatccaacaaagaataaaagtataccagaaacgacgtcgaatgtattagtgatatacccagcttcggcaatagtgaggtcattaaccacttgaaggaaatttgagaagtagttgttccagcaatagtttgaaagctgatacgtggcatctaagaggcatgcaccgacgacggttcggttcgtgaggaaggagtatgggagcaaaggcgtaggagcgatatacctctcgtagaaagcaaagaagaagagcatcgagaatccgaccacaatcatggcaatgatataattcgtgccccagcctttaggagcctcgctggcaatgtcaaatggaagctcaaatagcacaagtcccgcagtgaagatgaagactccgattactatgatactattagttctctgtggatgaatcagttggtagttcggaatactcacaatcgaattcgagtgtccaaaaccagatgctttgaaggaatgatcgtccactgttctctctgataaccacagcatttccctttttggcttttgtcaggttgaacttcaggacgaagaacaacggcgcggccacgacagggaagatgatggcgaaagtaccataagcccatctccagccagtatgggcgtagaatagatccgccacctttggcccagcaaacgccgtaataatgtacggagaagacgtgaaagcgtatgcaagggctcggttcttcaactgggagagatcggcggtgatgacgtccacggcaaattgcatgcctccgaagccgatgtagtaaaacacctagatcccctattagcacatgttcaataattcatagatattcccgggctgtcttacatttgcagcgcaatagacagcgaaactgttgcaagaggccatcagaacaaggcctacggtggcgcaaattgacatcaccaggaacccttcggctcggccccaggtgtccatcatcttggccactggaaggaagacagcagccgaaaaagcatccgcaattgcggtaggaagaccagacaaggagtgttgttggaaagagctagccacataagtgctcaagctgccatcgattgacgatatccaggcataggtgaaatagaggaaccacatactattgaactataagattagcgatagggctgaaaagcgggtgaattgacttgcttactttatgaaaacgaagatcagggagactttcgaccaggtctgagccacagcctcaacttcctgaataccatgttgaagctcttcatagggcacacctggtagctcggcaccattgtttggaagtgtatcttcaggatggctgattgaaccctctgacttctccgcctctactgtgtttctgtctacttcgaccgaagaagaacttgcagcatcatcactgtcgactttcattcgacgaaagactgcccgagcccgttgtatcaagggacgaagcgtcatggcaatggatataagactcaaaattccaacgactcagagaggttgaaggtttcaggaagattttgaaaccaagagggaaaggcaagtaaaacaagcgaaattcccacatataaagtaaaacatcgaagtcggcacgtcggctagtagtattttgaacgaccgacaatcctttcctcctagatcaaaaatgttacaacatgcgtggtattaatataatgtagtccaaacatattcgttcaggccgtggacccttgctccactggggcctgcgacaagatctaatcagatcgtcagtggcttagagatctttaccacatccagttaccttgatcgagacccatcaggcccattcccttccaacgtcagtgtcaagcttcgtatagctgcttggaaatgtaccttggcattatgggccggccatattctctcaaccggaaaacacgggtcgataaaaatcttggaaagttatcagatttgccaagatttcgcattcatgggtaaacgcgtaaaattgatttctttcccctttcctacattagaatggacgtgtaactcaccaataggtcagccatttggctaacatatacgcaaacagccaagatctcgccggatgagaatctcagtacaagcctcatggcgtaacttaagccacccttggctcccctcatgcctccaccttgaacttttttttgagattaaggtgtttagcgttttttttttgtacgcaggagtctacataatccgattggccatatataattatgcgtgcatcccgaggccaattggaccgacactggatgttgtaccttacaacgcctgccggaaaagatatcttccggtatattatatttttcggtcaataacaacacgcgtgttttgtacacgttggcaagaattagtcactggaaagtcgcgatttcaacctggttcgatctcctttgatcagccttccggtggatcccgaaaatgactattacatattgctccgtctggatatgcattctcttttcgggtttcgacaagtaaaccacattcaaggccttgcctggagtatatcgatgcgtgagattgtatataaataccgccgccgcataacgatcgcctcagttcatcaggttcttgctattttggcttgcaggcagcaaccacatacactcgcgcaggcccagcttgtcagctccggacgaaatcccagggttgaaaaattcaccttcgtgggatcgtgtgcactcccgctgtaaacgtcaaaatcgaccgaaattcaaccatttccgatggtgtagactagcacagcggatgtaggaatatagtaacggacgtggaatcaagccaatatggctgttagattcgacgagatgggctatctttagtatgagaccatgacaatgacgtgaaatctggctgctaatgtattgcagccaacctccgaattcctaactatctcaatgtagtgtatcaaggccatcctaacttcaccctagtagaaatacaaacgtatcggggattggatgttcttgtaagctgtccatacgataaatgaggcgaagctcctagttcacgatcaaagaaaaaccaagagataagtctacaacatatgtacataccaccactttaattcactctatcttacatgattatttggtcagtggtcgttattgagctgttcattttgtcgcgagtaggaccggcttctcgatatacctatccacactaaaggatcaaggtatcttttcctgtacaccaactaataacatggaaggctatcgcacttcacctcattcgcagtttcgattcaaatatgtttccagtttgcgccaatcaaaagtagacgatacactccaaggctaccagacgaaaacggatatggcggggagcgtaactttcccctctcgacaatctggtcccactctgagtgtcgactctacaacctttttgaatcacttcaaatcatggcaaatacagagaatgaatgggaattggaggagggtatccctcagtttgaggatcccttcatccaacagtatctgaaaggacgcgatgctttaattatggaagagaaaaagcgacgtcatggtatttcccactcaagtcaagtaaaaaaacttcatatctgacttttgttgtagatgcaaatctgcgcaaatctttatcacctatcgccgcccgggcgacgaagattgtgtcacatatccgagctcaggaacagaacgagctgtggtcaagtggattgaatgagaacgcggcccaccaggcagatgaaatcctgtaccccggtgtcatgttcaatctggccaaaggccgcatggagacgactaaactatggaaaatcgtggaaaagatgcccaagggttctctcctacatgcccacatggaagccatgttcgacatggatttcttagttgacctggcattctccacgcccggcatacacatgttagcgccgaagccgttgatcacagccaaagattacgaaatagcgcccgtgtttttcaagtattcctcgcagcctctagaaagatccgaagacaagccaagtatttggtcggaggcatacgaggcctcgtcattgatctcgatccagaaggccgcctcctctttccctaacgggggagagaagggtttccgggaatggttgaatactcgatgtgtgcttatgccagagcattcgtatcaccaccatcacggagtagacgcaatttgggctatcttcaccaagactttcccaattgtcggctctctcgtgatgtacgagcctatcttccgcgcctgtctcttccggttgctcggacagcttgccaaggatggagttcgatacgtggagttccgccttgcatttgtcttcgaattccgaacggaaggaaatgaaaaccccgaagaagactacttccagtggtgtcgtgtggtggaagatgtcgtggctcagttcaaacaaacggacgaagggaaggacttctacgatcctcgcattatttggactacgctccggtggtttgacaacgagacgattgtcaatagcatgaagcagtgcatcgaaacgaagcaggagttccccgctctgatcagcgggtttgatcttgttggtcaagaggataacgggaggccgctagtcgaccttgttcccgtgctcttttggttccggaagcaatgtgcggaagaaggcgttgatattcccttctttttccacgctggagaatgtctcggcgacggcgacacgacagaccacaacctattcgatgccatccttcttggcactcgccgaatcggccatgggttctcactttacaagcatcctctactcattgatttagtcaaagagaagaagatcctcgtagaatgctgcccgatttctaacgaagtgctccgccttgctagctccatcaaatcccatcccttgcccgcgttattgtccagaggcgtccccgtttcgctgtgcaacgacgaccccgcaattcttggccacggaaggaatggattgacacatgatttctggcaggttttgcagggacttgaaaatgtggatttagtcggcctatcaatgatggcccagaactccatccggtggagctgctacgaagaccagtcgaccgccgagtggaaagctggtattcaaaatggggtaatggggaagggactgaaatctgaacgtctgcgggatttcgcttcgagtttcgagaaattctgcgagtgggttgtgctggagtttgctgagtacgatgttgatgttggggatgattgaagttctgtgtccaaaatatacgagtcatatacttagtaacctagcacgaacaataaccaactaactatgagaacacgaaagttgattttggtaatatttcaactggtgtaagtgaaattttatcaccatcgaagtaatttgaaacagacaactcaatgagaagataattggtcaaatctggtgtcaatcggtgagttggcacgtcggcgcctgactccggtacttatcgcgcctttatcaggtgcccggaacgtcattgacgaacattccctccgtcacgacctcccatccactccgctttgtcggagctggctgatttattgtgtttgttaagctattttcgatgatccgagtcggcacatgaacgagccctgtcccggctcccagtcacgatggcgtcgtactttatgccatcgttcttccagaagcggctcctcaaatatgccctctctcgcctgggcctggtcgacacagaggccttggatccagataacttaggtatccgctggggacaacggtctatcatcgagttgagggatatcggtctcaaactagaggtgagtgagtgggtgcagtgagcctccgcgggcggcggggcggcctgtcgtgatcatcgaacccgacctacagagcagtgcgggctaactattcacatcgcggaatagaaactatcgacgatactcaatcttcctccgtcgtgtgagctgctcagcgcccgtgttcagcttcttcgaatcaccctccctgccgatttccacaacagcgggatcctgtgcgaggcaaacggcatcgacgtacatattcggttattgtcagaggagccgaaaaaggaacaaaacacaaaaaataaaggcggaaaagatgactattcggcggtgcccacaccatctggtcttgcggagtcattccttgagtccgagccaaaggaggagagggaagagctgcaagccgcaatagcgtcacagtcacaggtcctgccccatgacccactagcctggtctgtcgatgacgatgacgaacttggcctcgggagtgatactctatcactgccgagctttgtggccgggttcttgaaaggcgttgtggatcgactccaactcaagataaaggatgcagttgtgcgagtagatatggagttgaagcaagatggaacgtcaaaacggcagcctgaacacaagccggaccttgtcgcgggtctgctgagcgtcggggaaatcgatgtccacggagtatctgagaaaactgttggtccggacgaggctcttccattccgacaaggaaagcggttgatatcaatcgccgatatcaacgttggtttaatttccgacccatcggtgttctcgaactactctaggtttgctgcccccgcatccccatcgacaactatgcgatcaaaagggagcgagccgtcaagcagagcgtcatcaccctctccgttgtatcgctctgttgaagaaccccttgctatgacccaatcaactattttcgagccgccgcaagcttttggtcattcaagtactacctcggacgatttggaggcatctgcattttcgcacggtcgattctcagacgccgactccgagtcaggtagtcaccacggtggatacctggaggattctcatgtatttggagatgaccccttccaagacaatcctgggtacctagactcggttatagacactcaattcgatgatttcgatgatgagcagtcaccagtaatacatcctgaggaagaccaacggttcaggaatcaatggggaagccacatgtctcatggcccacaaagcttgcaccacagccaacgggcggaatactctgatgagcccttgcttccgtctgacagccatcacatgtcccggacttacgaaacacataacggccaaattggctctgaaattgacgaaaccacgccactcacgcagcattacaacgattacaacgaaaatgaacataatgaaagatcacaattgagcgtatcatcccattcttctagtacatctccacgcccagagcccgagagcacgggcccacgagaagaaaccccaaatgtcgatctcaacgagtccaggcttttctctcatgatgaagcgcaaagcctttacatgagtgctatcagtcaggatgtgggtgacagcttcatgcctcacataccaggtggatggggctcgtttaatcgtggatcaaaatcccgaagtgctttggatgaccgatctaaaataaccgcgcccattgacccggcacagtccatccaagttcaagatgaagcaaattcaaggtgcgcatctccatcaggagacaatgtcaccgagggacatgatctggacgaccaaggccaatctcagacattgcacaaggacagaccctcaacttcatcgtctcctgggttgcacagaatcaatgaaatgaggaagtcgatattgactgtggataagattttgatgtggttttcgcctcctgcttccgaagaagaggcgccagccctgtcctcgcctgtgccgcggaaagagaacgcagagagtgacctaactgaatccacagttagctttggtgactctgcaccagaggaaagtctacttgcctctagactttacaaatctacgagattcggaagagactttgttgaggcacgggcccagtcaagtgctggacctgaactgcctgaaattgcggtggaagtgttctctatctccgtacattttgatattgcaactggttggctcctaaccaagataggacaaaaattgtctcacgctgttgatacggccgaaaaagatatgtctgcgaagcagtcacgaaaagaccagccggcgcgcacaccacctgttcatcttgccgtccatgcattttcaataaaattcattgaacatgttccagggcatgtgtattcgtccgacgataatggctcgtcttcgtctcctccctacaacatggacgatgtgatccttcgtctttccttatctggtctagatgctcgtctttcagctcaaagtgtaactaccaagctgaagcttcacgtgtccaagtttgcattcgggttcgcctccgaggatatcatattctttgatgaaagattgaagatgcgtgaatctacgcgtgatgttttatcaccttcgcagggagatatttctatctctttggtcaagtcgtcagacctgaccaaggttgacatctccacgctacctctccacatcaatctcaatgtacagcggctggaagaggtcctaggctggatgggtgggctgagtaccattcttgaacttggaagttctatgtcgtccgtgtcaacggttaaaggctgcccgccacctaccaaggcgcgcccacgtggtgtgcattttgagacatctgttccagctattgacaccaccaagggcaagtcagccccattgaaaatcaatgcccgagttggtgccatcctgttggatgttactggtgaaacccattgtcttcaacttaccacgaccgccgtcaaaatcgtcagcagatttgaagggattggtattcaaatagacaaggccaaggtgattggtccactttcaattgatgatgcttcatctgatactcccgccaaaatcacccttaataacatccgccttgaattcctttttgccccgaaggaggtcgatctcgatcgtcttttgacattgatcactccgtcccaggacaaatttgaggtggaagatgatatcatgctagacacgctgttgcgccagcgacgacaaggatcagttcttcgtgtgacagtcggacgcttagaaacgttcatttcagataccagcggtttagagcctctctcgtctcttgctgtcgagctgagtcggctttccaatgtcaccaagtatttgccggaagatgatcgccccggcattctcactttgatgctggtgcgtgacttccaaggacatgtccacgttggcggagaagtcggagacctcaagagtcaactcaccgatgttgaagtcgcacacatcaccatgccttcgctcactgcggtccaaattggaaccatgaccgtcagtcggaataacgatgaagagctggtgggacaagccctgtggccgccgaacaggtgtgaggacccagaccagtcctatccgccggtcctcatggctcgtttcatacccgatgaaatggatcctacctacaagatcaaactgcacaatctccttgtcgagtacacggttccatcagtgacggccttccttggattgggtggcaacaagatgagcggggatctcgccagtagtatggtcaactctattgccaaccttgcagagcactcgataccgtcatcctcgatgacaggacgacctatgtcgactgaatccagctcctcgacaaaacctgtcaaattggcagtcgtattcagagattgtgttattggcctcaacccccgcaattcccatgcaaaaggcctcgcagttctcaccaatgccaagttcggaggaagccttcatggagacgaatcagcagaagcatcgttggatattagaaaagcctcgctcatgatcatcgacaacgtgtaccatgaggaggcctataacctgcaccaacgaggatcggtcgtttcccaagacacccaggctcaagcgtatatcgataaaggttatgttcctgtttcttccatctcatcggcaactgctagtgtcaagcttaccagcgcggaggatgggacaaagtctttggacgtagagttgagagatgatctgttgattctcgagacctgcgcggattccacacagacgctcatcagcatcatgaatgggctacagcctccaactccaccgaacgtcaatatgaaatatcgaacagaggttatgcccatccaagatatgtttgcttcgttcaccggggacgcatttgctgctaatccccccatttccaacgataatgatctggcaactatccccgaagggtcatccggagaagatcagttgaccgacgaacttgaatacgttagcgatttctatcccgtgaaaggtggccctggtggtgtgggcgttgagggcatggaagcgggctccaatgatctgctggacagcttccattcccaataccaagtatcgtccagcatgacggaattggatttccaggaggaccattttgcaaagaaatcagctgtgggtggaacggcacatcgatgggattctacccagaacacctatggcttcaccaacgacacaaagctcgagcggagtcctttgcgtgtgcgggtgcgagacgtgcatttcatctggaatctctttgatgggtatgactggcagcgcacgcgtgacacaatatccaaagccgtcaaggacgtggaaatcaaggccacagaacgccgttccaggggctcgcaagtgtcacctttggccgaagatgaagaggagtctgtcattggcgatttcctcttcaactccatttatatcggtatcccagccaacaaagatccacgggaactccaccgcgagatcaatcatgacatcgatgatttcactagtgagaccgggagctatgcaacaaccgctaccctgactggggctggaagtcgccagggccggtcaggctctaagagggagaagaaattgcgcttgcatcggagcaaacaccataaaatgacgtttgagttgaagggggtctctgccgatctgattattttcccaccgggctcggaagagacccagagctcgttagatgtgcgggtcaaggatctggaaatttatgatcatgttccgacatccacatggaagaagttcgcgacctacatgcgtgaggctggagagaaggagagcggaacgagcatggttcaccttgaaattctgactgtaaagcctgtgcctgagctcgctgcatcagagattgttctcaaggttcgttacccagtaaaccataattcagaccagtactaacttgactcttaggtcactgtcctaccccttcggttgcatgttgatcaagatgctctcgactttatgagtcggttcttcgagtttagagatgaggccgccgaaccatctgatactccgggcgatgttccattcttgcagcgagtagagataaacgccgtgcaagtcaaattagacttcaagcctaagcgggtggactacgcaggactccggtccgggcgtacaactgagttcatgaacttcttcgtgctggatggcgcggacatggtactacgacacgtgatcatctacggagtgtccggattcgaccgaatgggccaaactctcaacgacatctggatgccagatgtcaagcagaaccaactacccggcgtgctcgcgggtctcgcgccgatccgctccctagtcaacgtcggcggcggcgtgcgcgacctagttgtcatcccaatgcgcgaatatagaaaggacgggcgaatcgtgcgcagcatccaaaagggcgcactagcctttgccaaaacaacctccaacgagctggtcaaactcggcgcaaaactagcgattggcacacaaaccgtcctccaaggcgccgaggacctgctgactcccaacgcaccaaccttcgacgacgactccgcggacgaagacgaagccaagaagatctcactatacgctgaccagccggttggagtggtacagggactgcgtggggcgttcagtggcctcgagcgcgatctacttttagcacgcgacgcgatcgtcgctgtaccaggggaggtggtcgagagtgggagtgccaaggcggccgcgaaggcagtctggaagcgtgcgcccacggtcatcctccgacccgctatcggggtttccaaggctgtgggacagactctgcttggtgcggggaataccctggacccgagcaatcggcgcaagatggaagatgtaagtgatctccgcggagccctgttttggttcgtggctgtggctgactacgattttagaagtataaacggtactgagactgagagtgaggtgcacgaggggtggtttggcccttgcatacttcgtacatacatgcatatttgttggttccttttctggtttttgatttgattttgatttttccgagttcaggttactttcctctttgcttcagttcgataccacatcacgaccgcattacaatcttaaattgctcttgcttgttctttcacatacttccagggattttcagtttcagtctatatgacgtgggagtcccgagttcaataaatgatcgaggtcttaagccagatctattgctacggatccaccaagtaccagaaccagaagaagatagcgaaaagcgatgtcgatcgcagttcgtacaacgcggtagcgtccgagtatactccttgaggcagttgccaccatgaagactccgtaccacattaaatcactggaaaattgtgtaagtcccgacgatcacctaggcagcctgtcacctgggcagcctggggcaacgagccagcaatctgtttaaaattgcattctgcatgctgcatgtgaaacaaatctgggggttgcagtaacattggcagatgacttgggcacaattaaagatgagctggcatgccgatctatgtacttacagccaacgtgtgcatctgcatgtgtgccttgattctctcaggtacgagggtacctcgtacgaggtgcccaaccatggaacaaagatcaagagtccaagtccagtccaggccaacagaggacataatgtatgtgtacgtactattccacttcctcccagccgaaagacgacacgaatcagccattgcgagagtccagatagacgagataaaacccgtggttccttgcggactgcatcaacggtgcatcactgcaaagtaccccatacatacccaaggtacggataagccctgggaaggaagtccgaccatgaccaagtcatgatgttgccggtggagaagggggaaaaaatattttcttttgccacatttgaagtcgaaccggatgtccaatcatgggggctggaccccacagccgaaaggaagatttttgcctggctcggtcgtgtgctaagacacaggttcgttctgttcgccgactggttctgggctttaagaggcggttggtgaagattagggattggggtggatgattggttggaaatagatggacgaaactaactaacggactagactaaaggggagatcgaggctgagatcatctgcaggtgatttgggcgcgacagaatattcccttactagtatcattcaggcatcctagcatataacatagcgtataacatggttctatcaacatatatcaacataacatccctatacaaagatgacgtcgaccagttgatcgacgaaccatgggtcactgacagtccggtctcgaccttttcctttgcttttctcttcttcttcgttggatcggtagggccggcttcccctggcttttaactagttcgactgggtcgatgggtcgagttcgactggctatagtatactcattgttcgtgattgagtggatatactctgagatccaggcacattccgttcgtcccggtttatattttctttttcttttcaacataaaattgctctccctgcccttctgtaccttgcagtcttgtttattgtgatccattgacatcttgcgaccggtaagcctatctcctatcccttgcggcctgaatctgacgaatcaagttcagtgtggagaagtgggtttggatctactgcattggatatgtcgacaatctaaagagaggtttgagaaaacatccagaagcaggccttcaagcagacacgcgaaatcggggatattcgcaattccaacatgaatgaaatcctcaaccactccgccgccaacgacatatggcatggcgagctgctggacagccccctctgccacaaatgtctcgatctccatgataaccatgcatgtactactcctctttccaaaccttttttggacgcgggagacgctttgtccctcccccctcgatccatcaaatctcgtatcacgggagacctttccatccacgactaccacaagttcctctccaaggctgcagaccgcattggcgatcccgtcgatcagacaggaaagaaattgaagcgaaaaactgctgcgttgcatttgaatcgcccgtcccctctttccatctcttatcctgtatctatatcgtccgtggcctcgagtcctccgccgctgtctccttcctgctcgcaaagcattgtctctcattggagtgaagagcctgagatcggggaagcccagactggtaagcatctatgactatccggtcgattctctcgagcatttattaacacttcatagttcagtaccgatctacacaaagccctggactccccgttgtctcagatctcgggaatcgtgctagacctaacaggaaacgattggtaagttggctgagacactacacaaagacccagctcacttattatagtccaagaatacctttagggaaaagctccagcaaaaggcccaagttcaagcggaagaagaaacagaaacagaacctgagtctgcctccacacctcaaccctcggactcaatgctggccagtacgcaggccgttgccaccgtctcacacggtggtgcctgctttgagatcctgaatccgcgcaagtcgctggatctagcacgcatcgtctcatacattgaagacgtcgataattgctccgtctccacagacaatacccgagactcgactttttccatcgagcaaggactggaccgggtgtccctgtcccaattcaccgatgcctcattgccatcattctattccagcaattcgttgtacacctctatctcacccgatccctcgacagccaaaggtcagccggcggatatcacctccccgcgagtcggcgaacgcgtccggtctctatcagactattctgtcaacgaacaaagcttcaactactggagccgacctgcacagagcactgacaacgagctacccttcgaaactcatgactacccaagcagcggcagagagggcccacaatcaccacccatggctcccattacggaagaaaccagccttccaaatctagatttttcccgtcgaccttccaccccatccacgcagaccttctattcagaaagtgagatcggcgagccgggctcacccgtctacgcaaacggagattgggctcaagtcgacgagcgcgacagaggcatcttattcgacgtacgggaagacgaaacaacacccgaccactaccacgactattcatcctcacaagaacatcaagacctgccaacaccccgcgaaccgcatctcgagacaccaagtggttcacccatgcactcgcccatgtactcctccttcgactccgcctacccctatccaacctcaatctccactaaacccccttactctagctccttcgatcccttcacctacgacccggtgtacctcgacccacacgtccagtctgttctcgcagccgcgaacgcagagacgatggggttacggggtaatcctgcacgcgcactggatgagctgcagcgaggggcgcccccccggcgccnnnnnnnnnnnnnnnnnnnnnnnnnnnnnnnnnnnnnnnnnnnnnnnnnnnnnnnnnnnnnnnnnnnnnnnnnnnnnnnnnnnnnnnnnnnnnnnnnnnnnnnnnnnnnnnnnnnnnnnnnnnnnnnnnnnnnnnnnnnnnnnnnnnnnnnnnnnnnnnnnnnnnnnnnnnnnnnnnnnnnnnnnnnnnnnnnnnnnnnnnnnnnnnnnnnnnnnnnnnnnnnnntgccacccgccggcgattcgagttccaccggagaaagagtgatgagcggaagactcagaagaaaaggctgaggaagttctttggttggaaatctgggcattagggagttctgtgaacttgccttgtgtccgttacagctggattctgtgaatcgacagctggctgtgtggtgacttttggaccgggaattcgattatgatttacgtccattatgatggaagagcgaggcgcttcggtgttggattggattggattgggtggactggctggatacgggtctcgattcttttcttttgttcttttctaccgtgtccttcttactactcttattacactttctttctgggtctgagactcacattgtatctatatcattttacttacattgacgcatgtcaacattccggttatctcaaacttttgaactcaatcattatcctggaatagcagtaacctttgtaaatgtccacaggaacgggtctactaacgcagatcaatctccaactccggaatatttctttctttatttcgggtatcaaatcgaggtatatacaacgccatccatggaaaccaaaatgcaacatcaccaaccttaacctaatctaaacccaacccaccccaacccaacccaacccaatccaacctaatcatcatccctctccaccatcgacgccaacgccgcactaacaagactcttcctccgaagaccctgctcattcctcttcccaaacccataatggctcttctcaatgcgactcgccaaaaccccagcggaagaactcttcctcctacccctcccctccgccacaccctccggcccaaaccgactccgcgacagcgcaaccgctcttctccgcggcgacgcccgcggcggcaacgagctgggatgacaatcctccccgtcgcagaggtccgccgacgcagaagggtcctccatcagcgagcgctgcatggcctcgacctctgactcgttgcactgcagcctagagatctgctggcgctgcatgcggacgtcatggtggtagggatgtggctgggggtagaaggggcgttcggagccgaaagctggtaggtcggacatcaggtgcggggggaaagtcgggcttgttgttgaggaggcagagggcgaggagagacagtcgacaccggagtcgtcggagtggtctgtgtctggtggtgtgaggacgtagcctgcgcccggggagcgccgggagccttgtgtgtgtctgctggctcggttttggtcgcctagggtgtgttcgtgcagtttctgcgttagggttgcaatcgataggcgcttgtggttgtggtctgagtcataggggaaggggacggaggttgggggttgttggttttggctttggttgcgggtgaagcgcgagcgcgagatgttgcggaagcgttgggattgtggtgagggacagcgtgaggagagtggggagattaggttgctgtcgctgtcgaccattagccggtcgtcggtgtcgagggcgaggcggtcgggtcgcgacgacggcgaggtgaaggagaagttttcgaacattttctttcggtgcttcggaggcgagggcgacgtggcttgagggtgtgttttgaatattaaggttcttgatctgcgttttctttgacggtaatgttgtcggggttgtcggcctttgagagttgcgatgtgggtttcgagccggaaattgaccacctacacttggaggtagtggacacggtttcgcacagtgtctgatcttcgattgatatagcgtagacgattatttgcccctcgggggaaaaaaattggttgtcgaccactggttgaggttgaggcaaatgtccacgtgatcggcaaccactgtgcggcagcgttagcacagacaggggtattttttctatttttgttgatttggatttttgtatcaaatcaaagcatttaagcagtagttcggtttcaaattcaatgcaatgaatttcttcgtcttttttctttttcttgtgcattcccctgcaagacttgcaagaccctggttcttaaatgcatgtcgatcctcatgtggatacccgtgccctaagtcgatctgcatctgcggactgcacgatggatgtacggcgtatggtgtagtaagtagtgtggtgatcttgatcagatatatattcaatcttgcattgtttgcatctgctggacttgcctactcatataactgggatttcctggcaaaatcatcgaactatgtactagacacgagatatatttgtgcttcactgaagtaaatattattagaattttactctggcgactcaacgcatgtacaacagataaatcccatataatattacgccccaagtcagtctagttgaagttgtgcatccaatagatataggcattgtaaggggtagcgaccataatccaagtaatcaagttgaagacatatagcaaggaacaaacatatgaactcaccgtaataggattaattctggattacgtcaataaagcgaattttctgtgtaggtgcgaagaacaaagtgattagagtgtcatatcattcaagctcgctgtttgtaatagaactggatagaatcccaagtgggttagacgataggggctatgggtgtggctaaacaatgctggagtcatgtaggtagaactaaatatgtggttgctgtataaagctaaagctcagctgggtggacacaactgggaggtcgaggacgtgatggggcctaggacggactggacgttggttaaatatcaaagtcagtgtagcagaagtaaggacacccagtggcctagttggtaagtctatcgagcagtaccgctctagactaccctctaggtcaactgcctggtttagaacactgtcgagaatttcgcactcacggctctgggttcaaaccacttgtccactttttttatcctttttcttctctctccctatattagaccctctaggtcaactgccaggtttagaacactgtcgagaattacgcactcacggctctgggttcaaaccgttcgtccacttttttgatccttttttttctctctccctacttttgttatatgataacagttctatgcttttcctacgcctttaaaaagggtagatgatatttgacatgacattctgtattctgtcaaggcattcactgtatgtcaacaacatagacttcagtatcaaaatgtgcgtcactcatcctattgactttgaccttggcgttctcggtcacagaaagacgtgtggtctagaatgaatctttagtctaatgcatatagtagttgactctaacatatcgctataattttacatggaaccatatatgataaggaaaaggaagttagaaggaagtgagggaagtgagagaagtgtggtgaggcatatacaaggctacgtgccgcctcgcttccttctcatctccatctcttcacttgcatactcgcttcacagtatggcagctgaacttcctgcaaaccaattacgtcttatttcgccaaaaccaagccctgcagatttctcacctcgcaaatgaaagacgactctgtctcccaaatccatcctttccaaggactctgtgctgttcttgccccgaagttctcaattacagcccttgtctgctctacctggatttgattcaaaatcattgggaagtgataacgatactttcagaattgaaaagctaatgtcagcagatctgaaatctcctccgtctctccaaccaatgtttcctggcgccatcccacattatactatatccatcctgatcatgtaacagagcctactttacctgacagacaacccaaatgatgcgggcccagtcatccgctttcgctatcgcagtcgcgcccggatcgagatctcgcaagaccttgaatcctaatcaccgaggttcaggtgtgactatgatgaagatgttatggataacattctcaacggctgcaaaatgattcttcattgcgaccggatgactctcaacataatacgttaaggccaggagtgaaggctagctccggtgcaaaaataaaaggaggtccaaagccttcctccttgggcgtccttattcggaatcttttgggctctgggttcataaccgctgctgcccaagggttccattcgaataagaccgattcccacattcataccggtggcagagtaatcggcaagcttatcatggaacccacacataggttgtgttgttaagattgacgatgcgtggaatttgtgaacgaaaacacctcacgctagctactccattgactccactccaactccactccgactatttgtttatagcccaatatagaactttatacggagtataccctattgtattccagtaatgcttctaagattcatataatgtgagggtgtatggttggataatgtatcaaagagacacgcctatcgaacgagacaaaattggtccagaacatttccaaccatatgcccttcaattaaaaaacttatggattcataactcatgtttccatagagtgtagtataaaatagtgggctgttctgtattcgcagacaaataagttggttggttaagtatcaaagtcagtatagtacgagcaaggacacccagtggcctagtcagtaagtctattgagcagcgcctgctctagactaccctctaggtcaactgccaggtttagaaatcattttccttctctctccctatattagttcctaaagtataaaggagtatagaaaaccaataagcatccgttggtaacttgatcgaccatgagccatactgctctaggctatactctaggtcaaccacctgcgttcgaaccccctgcgagtcgcagtcgagaatttcgcacccacggcactgggtttgtacactctctttttccccttttccccttctctttagtctatatttccttttgttcctcatatcaccttttgaagtataacagcatggtatggcctgcatattagatacctgagccgtatgccatcgtcctgtatgacttggtggatatcctcctttctatttgatatttatacttctatctgtttctcaattagatgccacaaatcttcaatcaaaatttcttgggtaaagcacgcatgtctataaatattcatggccttccgggctgtagataagatattctatgggagctgttgataataaacgcctgatggctctgccgctactcaaaccaaggttttgtcccgaaggacgagaccgaaagggggaagtcaggttcaaacaaacctcaatatccccttcacgcactcactcgtcttcatcatctggcaaaatattcacccaatattttctggggaagaggagaggtgcttgtggctggggaactgggtcttgcccactagccgcattgacggcttcggctgcagcttctatttgctgttgtttgggttcgatatgtctcggtgcatacccttggtcttcttatggcctagtcgccggcatgactgtttggcccttcgggggagggtaggatcagatgagggaggcgaaggagggtatcgtgcacctgaatattgtcagtctaaacatccaacatgattgcgacgagagatggagtattgacagcctgaacacgcgcttcgcagagatggtgataccaatgaagctggtccttatacccctgcatccttcgtcggttatgatatgcctacaacttcttcttcgctggtgttcttgggctccattcccgccgtttttgacttcgtcactcataacagtatcttcagtaactgtgtcagtctttttgcgattttgcatactgcttgcagccatctctgaggttatatttggtgaaataatgaaaatggggatgaaagtgggagggaagtcagaagggattgagaaaaaatgataattttttctacgtgagatgtgcaaacagcctgtgtctgtgttgctgaatttgctagcgtctacgtctgttgtccagtcatcctcacactagaaaagcaacaacgcgcctaccacgatcgaggagactaatatatagaaagattgtctgcattttataaattttgccacctcctcgttcatctctgacttactagaaaattagcttgctgttcaagcatatagcatgttttctatcctggtgtcaaaatgaataaagcatcatatcatccaagctcgctgtttggtcagaataaacactactttatgctctaagtatagacaaggggatgtgaaccagcagaggtaaaaaggataaaaaaagtggacaagtggtttgaacccagagccgtgagtgcgaaattctcgacagtgttctaaaccaggcagttgacctagagggtagtctagagcaggcgctgctcaatagacttactgactaggccactgggtgtccttgctcgtactatactgactttgatacttaaccaaccaacttatttgtctgcgaatacagaacagcccactattttatactacactctatggaaacatgagttatgaatccataagttttttaattgaagggcatatggttggaaatgttctggaccaattttgtctcgttcgataggcgtgtctctttgatacattatccaaccatacaccctcacattatatgaatcttagaagcattactggaatacaatagggtatactccgtataaagttctatattgggctataaacaaatagtcggagtggagttggagtggagtcaatggagtagctagcgtgaggtgttttcgttcacaaattccacgcatcgtcaatcttaacaacacaacctatgtgtgggttccatgataagcttgccgattactctgccaccggtatgaatgtgggaatcggtcttattcgaatggaacccttgggcagcagcggttatgaacccagagcccaaaagattccgaataaggacgcccaaggaggaaggctttggacctccttttatttttgcaccggagctagccttcactcctggccttaacgtattatgttgagagtcatccggtcgcaatgaagaatcattttgcagccgttgagaatgttatccataacatcttcatcatagtcacacctgaacctcggtgattaggattcaaggtcttgcgagatctcgatccgggcgcgactgcgatagcgaaagcggatgactgggcccgcatcatttgggttgtctgtcaggtaaagtaggctctgttacatgatcaggatggatatagtataatgtgggatggcgccaggaaacattggttggagagacggaggagatttcagatctgctgacattagcttttcaattctgaaagtatcgttatcacttcccaatgattttgaatcaaatccaggtagagcagacaagggctgtaattgagaacttcggggcaagaacagcacagagtccttggaaaggatggatttgggagacagagtcgtctttcatttgcgaggtgagaaatctgcagggcttggttttggcgaaataagacgtaattggtttgcaggaagttcagctgccatactgtgaagcgagtatgcaagtgaagagatggagatgagaaggaagcgaggcggcacgtagccttgtatatgcctcaccacacttctctcacttccctcacttccttctaacttccttttccttatcatatatggttccatgtaaaattatagcgatatgttagagtcaactactatatgcattagactaaagattcattctagaccacacgtctttctgtgaccgagaacgccaaggtcaaagtcaataggatgagtgacgcacattttgatactgaagtctatgttgttgacatacagtgaatgccttgacagaatacagaatgtcatgtcaaatatcatctaccctttttaaaggcgtaggaaaagcatagaactgttatcatataacaaaagtagggagagagaaaaaaaaggatcaaaaaagtggacgaacggtttgaacccagagccgtgagtgcgtaattctcgacagtgttctaaacctggcagttgacctagagggtagtctagagcagtactgctcgatagacttaccgactaggccactgggtgtccttactcctataatactgactttgatacttaaccaacaccgctcccttctgaagttctacttttggcaacttatttctctgttgtctccatgacgaattactgcctggcctgcttaaatctcctatctatcgtttatttcctcctatacaattctctgttgttgtttcatcgccgccaccctctttgacctcggggaatatcatatcttccaccagcagctctggctaacagaggaaacgggctcgtttcgattatattcggtggctcatacctctatatggtctccaatacgctcgagcgaggtttgatttccaatttaacataccgatctcttgctagtgttcagttatcggtactagttttacaatgcaggcgcttcataaccgccttgtgatcgacaatcggatccacgaacagcttttggagtctacatccttggccatttttgtcttcaaacgttaaggttttgatgatttgctcctcagcaacacagttattttccccagaagccaaaaggcaataatgcttttccgaacatatccagtttacacgccaatccgacgaacaatgcatcatatgtcagtgagggtggaagacaaagaatgcatgccaacctgaatacaagtgttattgtcgtaattctctatgaatcgcctattacaaccgttgtttctgaggaccttctgcccgagcataagatgctacccaaacatacgatcatcccaagaaatgataggcggcgactttaaggtgcttctgatggtagagttactccttattcagaattgtttctggatttgataattttctcccaggggttgcattcaaataccatgacatatctcctagtaccatggctttccatatctcgtatagcctcaatttatacgtttaaatccaaactcatattttttgacaaggacagtctaccaatcctctctgtccaaatgctggttatctttggtgactcttggctcttcgaggtggccttgtgataagtctattttcacacgtataaagccctcataggagatacagcacccaatcccaatggaaaacttatactttggacttttataaagtttagacaaaagatactcgtacttgaagcgatagctggaagatatccgcgtgagacagacttcgtcagttgctacaaacaggtttattgggaaggggagagacctccccagtcaaacagagaatgggcgcagtcaacgaggaaggtgctcagctcttcaaactccccgcgcgtaaaacatttctcttcctctcctcttctcttttcgcatctcatcccatccacctttcaaaacagccataaccatcacaatggaagaccctctttcccggggggaaaccccaaagaataagaaaaagcggaacccaagcttccgccgatatctacgagaccatggaattgatgtcgtaagtacttatatctactctggtctcaacccgtcgaggtcttctgcttgtcccatcatagctacgcatcgtatgatctgaattaacattttggttgaattagccttcgcttgtgcagggagtacgtgaccctgcgcttcccctaaagcgcaagcgtaatcatcgccgctataggcaaaagaaggcgaagaagataggtatgttttatggtatatatgatactgggtagacgctaatgatctaaagagacagaagctgccgcggctacccaaaagaatgaggtagctgaatctgccgactcttcggctatcgcgaagagaagtttctgcctcatctcgccagttacagcgccctcgcctgccgctccctcacatgccacgccctcgccttccaagccctcgccctcgcctgctgtcacttcgcctgaaaatgtgacattgcccatccgagggcttcgaaatccctataactaactaactggttagttaattctagtctccaagaatgaagcttttcacccataaaaatgcagacatgtccatatttctaggtggtttccaagacagatgaagctattcagagatcacctaatctacaatagattgctaccatatgcttcatgtttgcttgctcgcttactgtttgcatgtctattagtttgcatcacatagattgtttgctagatagctaagcaaaacgttcgaggttaccaacttttgcaaagggtcagcgatatcaactggctgcttccaatttgcaacttgcctcttctttctttctccatcctagttattttgtattagatgcgctcctctctctttgcaagacctggcacataaaaggagtattgtaaatctaacacccccacagaatgaaaagcaatagtggctgtaaagaggagcaaccagattatcaagatcagtgagtcttgagaccgtgtgttctttgttctttactaggcagtatatcctaatcatgtaagcaatatactttaaaccatatagggtacatatggcaagatatgttctgtttttttgttacagagtgatcaggagaagcataacgcatcgtctgagcaggtaggtgaggtacatggtgaaaggcgagaatggtgattggatggagtatgaaaaaccaataagaatccgtctataatactgactttgatacttaaccaacaccgctcccttctgaagttctacttttggcaacttatttctctgttgtctccatgacgaattactgcctggcctgcttaaatctcctatctatcgtttatttcctcctatacaattctctgttgttgtttcatcgccgccaccctctttgacctcggggaatatcatatcttccaccagcagctctggctaacagaggaaacgggctcgtttcgattatattcggtggctcatacctctatatggtctccaatacgctcgagcgaggtttgatttccaatttaacataccgatctcttgctagtgttcagttatcggtactagttttacaatgcaggcgcttcataaccgccttgtgatcgacaatcggatccacgaacagcttttggagtctacatccttggccatttttgtcttcaaacgttaaggttttgatgatttgctcctcagcaacacagttattttccccagaagccaaaaggcaataatgcttttccgaacatatccagtttacacgccaatccgacgaacaatgcatcatatgtcagtgagggtggaagacaaagaatgcatgccaacctgaatacaagtgttattgtcgtaattctctatgaatcgcctattacaaccgttgtttctgaggaccttctgcccgagcataagatgctacccaaacatacgatcatcccaagaaatgataggcggcgactttaaggtgcttctgatggtagagttactccttattcagaattgtttctggatttgataattttctcccaggggttgcattcaaataccatgacatatctcctagtaccatggctttccatatctcgtatagcctcaatttatacgtttaaatccaaactcatattttttgacaaggacagtctaccaatcctctctgtccaaatgctggttatctttggtgactcttggctcttcgaggtggccttgtgataagtctattttcacacgtataaagccctcataggagatacagcacccaatcccaatggaaaacttatactttggacttttataaagtttagacaaaagatactcgtacttgaagcgatagctggaagatatccgcgtgagacagacttcgtcagttgctacaaacaggtttattgggaaggggagagacctccccagtcaaacagagaatgggcgcagtcaacgaggaaggtgctcagctcttcaaactccccgcgcgtaaaacatttctcttcctctcctcttctcttttcgcatctcatcccatccacctttcaaaacagccataaccatcacaatggaagaccctctttcccggggggaaaccccaaagaataagaaaaagcggaacccaagcttccgccgatatctacgagaccatggaattgatgtcgtaagtacttatatctactctggtctcaacccgtcgaggtcttctgcttgtcccatcatagctacgcatcgtatgatctgaattaacattttggttgaattagccttcgcttgtgcagggagtacgtgaccctgcgcttcccctaaagcgcaagcgtaatcatcgccgctataggcaaaagaaggcgaagaagataggtatgttttatggtatatatgatactgggtagacgctaatgatctaaagagacagaagctgccgcggctacccaaaagaatgaggtagctgaatctgccgactcttcggctatcgcgaagagaagtttctgcctcatctcgccagttacagcgccctcgcctgccgctccctcacatgccacgccctcgccttccaagccctcgccctcgcctgctgtcacttcgcctgaaaatgtgacattgcccatccgagggcttcgaaatccctataactaactaactggttagttaattctagtctccaagaatgaagcttttcacccataaaaatgcagacatgtccatatttctaggtggtttccaagacagatgaagctattcagagatcacctaatctacaatagattgctaccatatgcttcatgtttgcttgctcgcttactgtttgcatgtctattagtttgcatcacatagattgtttgctagatagctaagcaaaacgttcgaggttaccaacttttgcaaagggtcagcgatatcaactggctgcttccaatttgcaacttgcctcttctttctttctccatcctagttattttgtattagatgcgctcctctctctttgcaagacctggcacataaaaggagtattgtaaatctaacacccccacagaatgaaaagcaatagtggctgtaaagaggagcaaccagattatcaagatcagtgagtcttgagaccgtgtgttctttgttctttactaggcagtatatcctaatcatgtaagcaatatactttaaaccatatagggtacatatggcaagatatgttctgtttttttgttacagagtgatcaggagaagcataacgcatcgtctgagcaggtaggtgaggtacatggtgaaaggcgagaatggtgattggatggagtatgaaaaaccaataagaatccgttggttaagtatcaaagtcagtgtggtaggagtaaggacacccagtggcctagtcggtaagtctatcgagcagtaccgctctagactaccctctaggtcaactgcctggtttagaacactgtcgagaatttcgcactcacggctctgggttcaaaccacttgtccactttttttatcctttttcttctctctccctatattaggaccatatagaggtatgagccaccgaatataatcgaaacgagcccgtttcctctgttagccagagctgctggtggaagatatgatattccccgaggtcaaagagggtggcggcgatgaaacaacaacagagaattgtataggaggaaataaacgatagataggagatttaagcaggccaggcagtaattcgtcatggagacaacagagaaataagttgccaaaagtagaacttcagaagggagcggtgttggttaagtatcaaagtcagtattataggagtaaggacacccagtggcctagtcggtaagtctatcgagcagtactgctctagactaccctctaggtcaactgccaggtttagaacactgtcgagaattacgcactcacggctctgggttcaaaccgttcgtccacttttttaatcctttttttttttctctccctgtagtagtctctacggtataaaacaacaatatggtagtcttttaatagacactggcttggtattgctcttccccacggacaataaccatttattgatgtgacgcgctaacatttctattaagggggatagaagagaaccataacataaagctgtgatacgacgcgaaatggtttgtttagatagatccttgcctaagggatagctatataaacaggaagcttcccaattttcaacttgcttcttctttctcttcatctaagttattctgtattgtgtgcacacttctcttgcaagacctgccacgtcacactaatctgtatatacagactctcctaccgcggcatgctcgctctcgccctcaccctcgcgtactattttgccttcctttagatgcacggccgctaagtctccctcacctagtgcccgtgaccatgtgggccaaagaggaggctagcccatcttctcagagtatgcaagaggagacagaggctgatgattttgtgtgggatgccgtggaccctctgggtctccttgaataactggagaaactccctggattgatatcagcagggcttctcgattgggagatgggttgttgggggcctagaggggccatacctcattcttgacatttgtttgggatagagttatgaggctccatcggaaatctggtccgtgcgtacgaaggtgtatagtggccaacagtcggatgcctgattttaatggttttatcgcctaattgggactagctcttaccagttttagaccgcctttgacaccgctcaataccatcttttgtaagtacacatcgaagagacgaaactgttaccatggggtaattcaaatgccttctacctattttaattctcaaaactacattcaaatattcgccacgccggagccagaggatacggagagtttgaagtttatacggtcggtaggaatggggactttgtgttgaaatccaggcttggctttccaaccgttttgggccttggtgtcagttgcgctattagcttttctccgggaaagtgcgggactacggcgggtatgaatggctttaaatacaggagattcatatagttggagggccttaacgcctaggatcgatgagaaatagtattttggggggggggggggggggtatgcaaactttctttttccaatttttaaccnnnnnnnnnnnnnnnnnnnnnnnnnnnnnnnnnnnnnnnnnnnnnnnnnnnnnnnnnnnnnnnnnnnnnnnnnnnnnnnnnnnnnnnnnnnnnnnnnnnnnnnnnnnnnnnnnnnnnnnnnnnnnnnnnnnnnnnnnnnnnnnnnnnnnnnnnnnnnnnnnnnnnnnnnnnnnnnnnnnnnnnnnnnnnnnnnnnnnnnnnnnnnnnnnnnnnnnnnnnnnnnnnnnnnnnnnnnnnnnnnnnnnnnnnnnnnnnnnnnnnnnnnnnnnnnnnnnnnnnnnnnnnnnnnnnnnnnnnnnnnnnnnnnnnnnnnnnnnnnnnnnnnnnnnnnnnnnnnnnnnnnnnnnnnnnnnnnnnnnnnnnnnnnnnnnnnnnnnnnnnnnnnnnnnnnnnnnnnnnnnnnnnnnnnnnnnnnnnnnnnnnnnnnnnnnnnnnnnnnnnnnnnnnnnnnnnnnnnnnnnnnnnnnnnnnnnnnnnnnnnnnnnnnnnnnnnnnnnnnnnnnnnnnnnnnnnnnnnnnnnnnnnnnnnnnnnnnnnnnnnnnnnnnnnnnnnnnnnnnnnnnnnnnnnnnnnnnnnnnnnnnnnnnnnnnnnnnnnnnnnnnnnnnnnnnnnnnnnnnnnnnnnnnnnnnnnnnnnnnnnnnnnnnnnnnnnnnnnnnnnnnnnnnnnnnnnnnnnnnnnnnnnnagatgggggggggggggggggggggggggggggggggtatgaatagcttcatgtttcaactttcaagctgttctcaatttggtactaggagatctgtcatagtaattcaggtattttaatttcctgccggtctaaaattggtaagagctagtcctaattaggctataaaaccattaaaatcaggcatccggctgttggccgctatacaccttcgtacgtgcgtttttttgataaatgcaatttcaacgtcttcctttaccattttcattgagtttttggtctttacttaatcgtaattaaaaaagcagagctacgagctataggtagagactatggaagagatctatcaaatatcttgtttgaaagctcgagatattggcagtattcgttactatgaccgattatcacgtgattgagattggttaagtaccaaagtcagtgtatagtattcatgcgaaacccagtggcctagttggtaactcgaccatgagccatacctgctctagaaggaaatatggtaatcgtccataaaaacattgtaaaataatatgaagaagtctacgggggatagaaccttggtggtgcccttataataaatttatcaacgatcaagaaaaatagatctaatgctataatagcttctaatttaaccttatgtattctgttatgttctgagcaggccatatcttgcgcatgaaaagagcacgaagctcacccgctcatttcatgacgtgacagaagttttgatcttggtctttttctaatcatggtgtgatgaacttgaaaacatccatgaggctttgtaccgaccttgaagttcaccaaaacccactgaaaccccctggatatcagaactgggccaagtgagcaaaacttggacgagttcgaaagaccaggataagtaaaggaactcaaaccctcttgaagtattggagcattaaacccagatcctgtacgatgttatcagaccgtatccaagttgagatgtgatatgcccggaggtaactctagtcagtaagtgacagcgaagataattctgagcccaagtgtgcaagtggcgcatggagacatcctagctgtgtcatgacctgaagaccccagttttcagtatttcttccgccaccatcgtttcaaagggcctcgcttctagcccacgagagtgagagcttgttggcgaatctcgcagatgtatgggctcacaaagcgacggacgatgcgtgatagagtacagctctagaaaacatcaattagagtcactgtcttcgagaaatcaatgacacttatcatgtagtaattcttcgattcttctgatgataaaatggcagcatgtgttgtagaatattccaatattgcgtctcatcttacaatggagttggcctcgagaatgcccaactgatagtcagcatatgaggatccagcccggttctagatgaaacttggttgacgactgatgaatttagaagtggaataattgtgggagagaagagaaagagaaaaggcgcaaatggagacagcaagcatgagcaaacgagcgagactgggttttgtgcccactacgccgacattttttgtacgctctaatctttttctctttgtttacgacccaagaaaacagatttacacgcattgcaggaagttattgcaggcacaagcttcagggcaaactatcatattcatgttggccttatgttgacatggtcttcgtccaccgacttgacctcggtatagacgagagtgtgagctcagtcacaaccaataaatctcatggtatgttaattgattgaccatgagagcagaacacttccaagtctaagctgaaacccggtgttgcgggggttgaagtaaatcggggactatcgcgggaccgcggacttttgtccgcccaactccacttcttatcaatgaccatacaaagtactccagaccttccagctttcctttataaagcgatagtacgcatggcgcattctctgtttttacgaaatcccccaagaaagtatcttcaacttgtgaagcctctcattttgaaccctgctcgaacactttcttcatcacgtatacaagctatgttgacaacagagctctctgagactcaggtctctgcgctcagggctaacaaggagcgcctggccaatgatcttcatcattcgtgtcaatggggatctgggatcaggtggggagagtaagatacaaccatattttccaaggcgactggagaataaccgctaacaaaagcctcggcgacttgatagtggacctacagataccggcatgcagcgcctggcgatttcagaagatgacaagcacgtccgtgattggttcatccggactatgaaagatctcaagtgcaacgtcaccgtggacgagatgggtaatatctttgctgttcgtcctggtcggagagcggatgtacctgccacctttattgggagccatctcgatacacaaccgaccggtgggcggtacgatggtattctgggtgtgttgtcaggtatcgaagtcatcaagactatgaatgacatgggtctggaaacggaaggcggagtcggggttgtcgactggaccaagtaagatcccacgttcaacctggacaatgatcatcactgaccgtgtccagcgaggagggcgcccgattcccgatcagcatgatctcgagtggtgtatgggccgagtgcatcccattggcgcaagcacataatctcaaagaagtcccaactgtggcatcgctgccaacagcggcatcagcaccagagactatgaagagcgccttgcagaagattggttacttgggtgatgtcccatgctcgtacaagtcgaccccgatggccgcccatttcgaagtgcacattgagcaaggcccatacttggtgtcggcaaaccagcgggtcggagttgtgacagctgtgcaggcctacaaatggttccgtctcaacgtcatcgggcgagatacacacacaggaaccactgcctttgaacatcgagcagacgctctctatgcattcgcccagatgatggtgcgcgcacgggaagtggcagcttcgaagggttgtctagccagtgtcggcattgtcgaagcgaagcccggcagtgtgaacacagttcctggagaggtgagctttagcttggatatccgtgggcctgagacagagctagttgccgaagtcgagaaggagctgcgcgctgatttcgacgctattgccgccgctgagggtgctggtattggtaaaccttgtcgcgttgagtggactctagacttcgactcacctgcaatcaagttccatgaagactgcattaagtgtgtggagcagtcagctcaggctgttgtcgcagatgcttctgttgcggatacaaagtcacttgtgcggaccattatgagtggtgctggccatgacagtgtcttcacttccaagcgtgtcccaacgagcatgatttttattccatgcaaggatggtcttagtcatcaccccgaggagttctctactgccgatgattgcgctactggagcatctgtcattttgcaggctgtagtgcgttatgaccggaagagattcttgtaaggcggatgctcactttaaccgaacagaaacgccttgtatatagttcagaacgtttaaatacgtcaggtatattaatgcatattacaccgagattagcttcgaaattatctactccgtcgttgctcaatcagtgtgacgtacatagagtgaatgcgttctccaggaatgcaatagatcgactagtcaagagagctcgaagacctacactaagttcactaatagaccattgtcactcatgtcataaatttagcaatgagtgactatgacaatctacatcaatccacatggatctacataatgaaaccagtggaaacatgaatttcttctttttattttgtttcctgtatccccaagtcccagtgaagctggaccgagatctaggtgcaccgagtgtaaggcccatttcgagaaacctctagtccggcagccgaattcgggtacaccatcaagactctagattgaccgagaagtggttgacaggacaccaatgcctctcagcatttactcctggggagcagcaccacggccacggccgaagccaccgcggaaagagggagcgaactcgccgggggcaccgccctcctttccaccctcctcgcgacggcggtaaccgccctcacggggagcacggggaccacgacgctcaccgcgctgctcctcaccgcccatcatgccgcgggggggagcgtgggaacgctgctgcttgatgtgggtggcggggacaacctcggcggggaggtggagccactcacggaggtagtccagaccctgttatttgattagtatttggacatgtgagcgtgttagatgtagacgagtcgtacctcgggggtgagggtgtagtagtagtactgccacgagaactgagtcttgacaaagccgcgggagtccagggactggagggccttgatgacatagaggttcttggtgtcaatgtcaccgtgcttgggaaggttgaagtccttcttggccacgagcactccctctataatttgggttagtgaatccgcacatgacgcgagcgcaatgtcgcagtgtcgcgggaacgtcgacgaaggttctcgttacataccacggaagaggtactcgtggatcttcttgcggtcgtccttggggataagcctgcgccattgttagtaaatgtgtcgggaataatcgtaagagcgaggatacgtacattgtcgcgagttcctgttgcaagtcggggaatcgctttgacaacgcccgaaaataatggttgatttaaatgatggatgaagagtggagcttcgctatgagaaaagtgcgtcggtccgaattgggtgtagggttatgaccctaatcagcttgtggttcaggtcacatgatacaaccttggaggtgatacaccatcacgtgagaggaaccataatcgctgactaagaatatgattagtcatcctggctgcggccatctcgatcttatcggaacatcgtccatcttctaatacaactatactttcttcctaccaaactcttcagttgcacgctcctactagtatatcgtgaactgtttctgacacacaatatggcttcctcaactgtcaacgttctgttgtcgtcctttccgggactgtcgctgccggcgacactttcgttcattttgccatcgacagcgagcacatcagacctggccgccaagatcgcttcatatctcccctcatcactctctcttcagtctctcgtccttactacaacaaataacaaacatctcacggccacctccgagtgtatccaatcttttctcccgacccgtgatggcgtctttacctccacactccttccgctacgcctgactgcccccatccgcggtggcaaaggtggtttcggctctcaactgcgtgctgccggtggccgcatgtccagcaagcgaaagcgcaatcaaggcgataacaatggctccagtcgcaatctcgatggccgccggttgcgcactgtcaacgaggcaaaggcactagcggaatatctcgctgtcaagccagaaatggacaagaaagagaaagaggagcgtcaacgccgatggcagtccgtagtggagatggccgaaaagcgtcaagacgagttgaagaacggcagcggcaggcagaagttggatggacagtggatggaagatagggaggaaatgagtgaaaagactcgggaagcagttctacgggctgtcaaggatggccaatggacggataatcttcgcgacgcactcctgggtggatccagcaccagcgccagctccgagggcagtgaggaggatgcctcgtccagcgaggacgaagagagcgaggaaaatggagaatcatccaattctgttgctaggccgtctatgcctcaaaaggccgcaccaaggaagttcattggtttcgatgaggatgacgagttcatgagtgactccgatgacgagatggaggaatccggcaagggaaagggaaaggcgcgcgcttgatcttctagcaaaccaatatttgtccatgtttcacgacagcgttcttttactgctactttcagggattctccagcgcatctgtgtttcagcgccttctgtgccaataatttcagtctccgataggagttttcaatccaaattcatttactgccaccaattttagtctcactttagtatactaatccgtaaaatgacttgttgcgcgttgttgtacggcggcccgaatttaccatgtgcgctatcgatagataactgtctccaaagaaaaaagctccgcagctactccgcagtttcgcacgccatcatgtcactctgctctcgaggcgcagtgttcagaaacccgagattcagtctgctgtgtctgctcccaaagagcattcctcgatctcaggctcaaattcccttctcaaaatcgcgcgccgcgccacaatccaaaggccttgcggacctccgcaggcaatgccgatgcttttcaacaactcgccttcaacgagaacagcccctggctgagcctcaagctggcactctagccgattccctgccgttgtgctgcccaggatgtggcgcattctcccaaacagttgaggcaaacgagccaggatactatggtacatctcgaaagcagattcggaagctactcgccgtgagaaaggaagcaattgaatacagaaataaacaacaaaatgaggttatatctaccgagggaggtagcttaagcgcacagcagagcgatgccatcgaggatgcagtgccacccaagcctattcaaggtaggacatctagacaattgcgtaaggttgccattttgctgactgaagaaaaagatggagcttttccggatgaagctgtcgatcccgagaataattttcttgggtctccgggtcgaattaccgaagtctgtgatcgttgccacgacttgatacaccacaacaaggcagtctcttcgcccaagccgactattttgtctatacgaaactacctcgaagaatcaccgtatcgacacaaccgtgtctaccatatcatcgatgctgcagatttcccaatgtctctcgttccacggattcattgggctttaatgctgcaggagcaacgttcgcggaaccgacgatctacgaacgagaaatttgaacgcggaagaagacttccatcactctcgtttataattacgcgctcggatcttttggcggcaacgaaagagcaggtagactcgaagatggattatattcgcacagagctccgcgcagctttgggaagatcggggaaggaggcccgtttaggcaacgtgcacatgattagcgcgcatcgtgggtggtggactaaggaggtcaaggaagagattcgagagcatggtggcggcatttgggtcgttggtaaggcaaacgtgggaaagagcagcttcatcgaagcgtgtttccccaaggattctaggaatgtggagaaaattgaagagtgggttcaacgccgtgaggaaaatgagattcccaccttccttaaccccgacagccttctgccccccgccccccgcgaggatctctatcctgtgctcccagtcgtgtcttctcttccaggcactacagtctcgcctatccgcattccattcggtcgtggaaagggcgaggtcatcgatttgcccggcctagagcgtggtctgttggaggactttgttcgggatgaatacaaacgtgatttgatcatgacgaagcggatcaagcctgaacgttcgaccattaaacccggccagtctcttttgcttggtggtggtcttatccgcattaccgctgtgaaccctcaagatactgtcatgtcggccagtttcctgcctctcgagtctcatatcaccaacacacagaaagcaattgatacgcaggccgaagaaatcccctaccgagggactgtcattatgaaagaaggaaccggcagcacaattgcctcggccggtatattcgacttgaagtgggataccaccacctcgaatcttcccacctcgctagccaaagctgtaaaggacagggggatccctgtgccttcattgccgtatcgtgtgatgtcggcagatattctcatcgagggctgcggctggatcgagctcagtatacaaatccgcagcaagcgggacactgaagacgaaccttcctatccgcaggtcgaggttttcactcccaacgggaaacatattgggtgccgacgtccgattgaatgttggaacttcattgcagagaagaagaaaatcgacaagcgcaaacagccgcggacgagatattgatttttgttgtgatttgggtatattatatggacgtgtacattaggccatttagcatagcgggtcggcgtttctcctctccgtccttaaagtggtcagctatatcaattggctgcttccactttgcaacttgcttcttctttctttctccatcttacactccttcttccatcaagatcgctctggcgccttacaagatggaaaacattttcgatcttgtttttcttctagacacagacattccatttctgaaatcaggtaaattgcactccagaatcctcatatcactttgctcgttgtcctaacttcgaatatcgcttctagattcctgtcacaatgatcgaaaagggttatcggtaaaaaggccgcaaggtctaatctcccccctctcccaataggggctcagttatcgacaaatgcctgccaagtttcagatcaagatcacttatgcatttgagaccaatgcgtcagccggcatatttgtccgaatgacaacccaaggccgaagtttaggctagagcattatctacatactggggatgtaggggatgttgttgagtcttatatccgggcggggagatacagaccgcatgaatggttcatgcttgaagaccttggggatgaccaagaacgttctaagttgacaaatatcaattatcacatggaactaaccagttaacgattcatagcccgcagaatggttctttccaaaggtcctcattttgtacgtagggctcgtaggtgggggatcaacctttcgccttccgacaacatacgacgactcgcttatttattctgacaagattcttttataattgctagatttgttcctgtgcaattaactcgtctcaatatatatatcactccctaacgttcagcaaatcagcattcacgctcgtctatcccatgatgttatcttttcggggaagcgaaaatgccagggaactggccaagccctggcgctttagtctaactcagacctatgacccaatggagaacccgacagggctcatctcatttggcctggcggagaatgtatctacaacatatatcctcacggccggaaaccaagagctaacttccaaccagagaccaatgagagcggagatagccagatatatcaaccaaaatgtgcgtattccaattttcacttcatgcccacatagtgtccactgactgaaagaatcccgctaaatcacataggtcgtttttacacaagattctatcagctaccgcccaagcgcaccgacagctgcaagattaccagctgctgctgcagttcacctgaacaatatcctcaaaccacatgccccaattgatcccgaggacatattagtggcagactgtccgacttctcttggcagcatgctaggacacagtctcgcagaatccggggatgggatcctcgtcagcagacccatatatggccgctttgagctcgactacggcgttgaatctggcgttaaaatggtttatgctgatacaactgtggaagaggcattctctcctgcttgtgtggaaaaatatgaactggcttttaaggaatcctccaagaacattcgagctgttctgctcgtcaatccacataaccctgtcggtgagttatacatgccgcttggtccgttgattgaactgatttggtacggccaggtcgttgttacccagtcgagacactcaaggctatcacccgattctgtaataagcataacctccatctcatcagtgatgaggtatacgcttcatgcgtgtttaattctggtgaccctgaggctgtgccatttacgtcaatcctctcgctggatcttgcgggattgatagatcctaacctggtccatgtgttatatggtttcagcaaggtaggcatcggaaaatctcaatagaggcaaccaatttgacatgatataattataggacttcgcttctggaggcctccaccttgggttcttggtgaccaaaaatcggcagcttcggcaagcctgcagaacaatcctgtgagatctcgaccgagcaccacgaaaactaaaaaacgtcaaagattaactctatataggagactgcacggcgcttcacaagcagcggtgactatcggcaccgtgattctagaagaccaagctttcgtggcaagcttcacagccaaagcaagacagagcctcgcttcagcctaccggtttacaacctcagtgctcaacagggagggaatcaactatgtcaagggcgggtgagtataccaaactcggagaagacattattcaaatcctcatctaatccggttatcagaaacgctggcttcttcgtctacatcgacctgtcaccatatctgccccgtgacgattatcttaccccgcgaaaccgggagttttctcttgctgagaggctcgtcgatgctggtgtgttcttacatcccggggaagagcattcgagggatattgggtggttccgcctggtgttctcacaggaagaggagatattgcaggaaggctttaacaggtgagtcatttgctgattatttctatgtattggttcggcccgttgattgatggtttgttttgtgatttatagattgttgagtgttttaaggtcaagtaaatgaaatattctcgatgtcaccatcaagacttgaagatacggggaaagtatggcataaaaacgaaggacaatgcaatcagaggtagtgaatgcttagatgcaaaggaatagaactgaaatattgaaaatgctatatgctatatgttttatttgattttggcagaagtcatcaagcatgattttttgaaactggaaaatgagattgtatttttcaaagcaatgtcgtttattcgacgttgacaaattggaatgtaggagttcctggcacggcattctcaccggccaagccctcacgcttctcaccagtaccaacaacctcaccagtcttgccaccctcatcaacagcaatgatctcaatctccttgaaaccagaggtgcgcttcagaccacccaccatctcggaaagaacgacgaactcatcgaagggaagcttgcgatcgaagacagtggcaggggactcgccagcgttgaccagacggcgcttcaggttctgaacaaagggcatggccttcttcatctcaccgaacttgccaacctttgcgctgagctccttgtcgttgaaggagaggttcagcgcgtcgaaagaatcgcggaccaggtcaatgtacttctcctgccagttggggaacttcttggcaacgaagatgataagcttcttgggcttgcgggggtcgaaggcaatgttcttgcccttggagagcttcttggtgaagttaccctcggagctcatgatgttgcttgcggtaccacggacgtagttctgagcggcggtcagctcgggagagggctctggcacagaagggaactgggcgaagtgaatagactcgggctaaaaggtgttagatcaaggttgagcataaagtggggtaaggaaactgaccttattgaggacctcgagccagatgtgctcagcccagtgaggagtaatgggtgccagcatcagagcctgcagctcaatgtagcgcataatggtatcacggtgcatacccacgccagcagcagtggaagcctcacggtagctgtcacgggagctagtgaagtcatatagaccggacttgagagcaagcttgaaatcggtgctagattaaagggttagttattgatgtcaatgaattaatggaatgcgaagcaagagtgcaaagcagtgaagtccacttactcctggtagtgcttttgggtctcgcgaaccaggctgttaagttcgttattgaaaagcttgtcagcgaaagcatcagcaggtccagtgcgcagagtctcgtccttagcaatctcctcgatccactccttcaaggtgtggagacgcaggatgttgctgttggcaacagactcctcaaagttggcatcttcaatgctgtcaccagcatcggcaaatgcaatacgggtagcatcggcaccgaacttgtcaacggcatccttgagagtcaggaagttaccggtactcttactcattttctcgccgttgaggagcaagtggccgttagcacggacaccacgaggccagtattccttggggaagagagcaatgtggatgtagaggaagaaggtcaagtggttctggatcaggtcctttccggagacacggacatccagagggtaccagtattcaaattcacggcgcattttctgcagagattccttgctgattccactcttagagatgagctcgtcgctaatttcccttcttgtgaaaacgtagtcccagacctcatcggtcatctgttcggcggtcacgttcagggagccggtcgtcttgccgtaccggtcaccgtgaaggaggtgggcgatggtgtagtaggccatatagacggtactgtcactcagactctcaactaggaactgcttgtcccatggcagcctggacccaagaccataggttctggcacatgcccagcggttcagccaggaaagattcttctcgaacccgtttttgcattcggcggagtaggtgttgaggttgttgacaacgtagttcagggtctcctgctgccactcggcatcattctcaccgtagttcaggaaccactggcccaggtaggcaacaacacagtcgtcaccactacggctgacaaccttgcccattgggtcggcgaaagggaaggcatcaccactgtcgtagaggtccttgcggaccttgtccttagcctcactgacaggctcgcccttatatttaccaactagcatagtacccttgtagaaaccttccatgtaggccaagtccttggcctgagcaagctgggtgacgtccttgggagagttgatcttcagctccttgaccagagcaggagcagtcaagctgccgtaggtgggagtgtcaataagcgggaatatttccagctcagcccactccttctggatgccgtaatactcagccttcttcgccaaatccaccagggtggcgtaatcgtcagggctgtcggagggaacagaggtaacaacaccagtacccttggctgccgaaacactttccatgggcaggatgcgaataccctcggcgtggaaagacagaggtgcattgaccagtgttccgacgaaggcggaacccggcacctcgagaaccagcgggagctcatcttgggtcttggggaacttatcgccgaagaaatgaccctggaaggccatgttccaagcagctcgcttggtaacaacaatgtattccttctccttgagcttgaaaagaccgtagttgatcttgggaccgacgaagcagctagtttgaccgtacatggtctccggacgcagggtagcaggaacgaagtataccttcgcgtcatcctcgatctttcctttcacgagctctgcaattttaggcgaccactccttgacctggagcttgatcgcggagtattcctgaggaccgatgccctcaccctcagtgcggtcgtggtccatgcaaggctgaccgtccttaggcgagtagatggtgtaacggttgccgtacatgatcttaccgagctcgtgcaggcggttcatctgccaacgcacgaaagcatcgtagtaggggttagcatcggtggtgacgaactgtcggcgccaatcgatgcgggcaccgatactgtcgagatcacggatggcaagaggagggaagtgttcgagccagtgggcagcgtcggcaaacttgtgaatttcctctagaggaacgccaattgccagcatgatctggaactgatacttcatcttcacggtctttgcagcggccttgctctttttgccagagaacttctcacctgcctcagtcttaacttcttgtgtgggggctgcgaggaggtcctcggcggcctctgcctcctcattgtatccttcgaaaccctggccgaacttcttcacctcgttggcaagcttatcggcacaagccttgataggcataccggtgcagtggaagcccagagggaaaagggctcgcttgccctccatgcgggcaaatccagccatgaactcgaccttactagcagtaaagctgtgtccggcgtgcagagtaccgttcatgtaagggtaggccatggtaccgaagaacttggggtacttctcacggagctcggcgggggtcatggcaccctggggggattcctcgaatgagggcgcatcgacttcgaaaatcttgttctccttccattgtgcttggtacttcttttcgattgcgactagggtgtctcgcttttcggtctggcaggcgagatgatagttagtaaataaaaatcggggatggtggggagggaggggtatagccacattttccaatttgagggtgttctttgagctgttgctcggatcgagctcagctgcggatgcaactgcggcggccatttttcctgattgtcagaattggcctataattcccttggagagcggaggggagcaaaagaagcgcgaggcgagatataaaactgtttgctcggtttgttcagtttgtgagtcagtgtaatacgagtgtactgtattttacggcggattccacactccagatgtcgtttagaatgctgcattggtgtgtaaaagaggtgataagtaagagatctgaggtaatatatgtatataaatctagtcaaaagatgaattctcattctccttttgtctctaaagtgagtttcaactaaacgtcttctatgtgaccggatcaataccatctatagattggaggtgcacgtgactatcacggagcaacttcttcgccgacaagcgcatctgcgataaatttccccgatcaacaaactcgcaattccggacctatattacctgttattgagcaattatcttgccaattagtcttctacttttgccttatccctatacccgcacgtctcatcgcataagggccagtccctgtgcggaacagccttcatcatggtcaacttgttcaagcggcttcgtaggctgcaaactgtatgtatagcttctctcagctctccctacccgagcttctcaatgtaacgcagaattgatatactaatgtaaaattgtttctgtcaacagagagtaagcccgaaaccccgttcttcgagatctccgaccctgcaacctccgaggccgaactcgtgtctcccacagtctggccgatatgcaatcaatcaactgactcgttctttcactgttgcagatgctcgaaaccaaagttggcacaggtgcagccatctttcccagcctcacctccgcatcaaaagaattcccagccgtcacccgactccacctcacatatgcacgcaagatcgaccagggccacggaggcgcgcggcatttctggcgtaactgtcttccgcgactgaaatatcacaacccaggcgtgccgatgactgtggcacaaacctccaaccagcaaggacccgcagcattgacaatttacttcgccgaacgggtcggcagcgccgcagcggctctcgcaaacgaaagaaaggtcgtcgatgagcttgccccgacccccgaggccaatgagcaatcagctgttctggatatcaagaaccgcacgtaccaacaaatctgggatcgtgtccaggccatgacgggcgcgaaggtagtccccgccaccagcgaagacatcgcgctggcgcagaagttggcggagatcaaaaagaaatcgggcccggatcgcgaacgtgtccaggctatccggcaggcgaagaaggatcaggagcgcatgctcgctgaggctagaggccaggtggataagcaaatgtaagatagtgcagttttgttctagtgttgtctttggattcggttgatccatccaactggtttcttcgtcttgagaaatcggctgtctgtagcatagcatctttttcccgttacgactatgtactatttcttggaatatctttttaatgcgcatgtcgcattcccttgttactcaaattgcgtgaacactgaagtagatggaggcgcataggcatcaaatagcaatagcaataattgtagattcaacatctcgcaatatcaacgctaaagtatgaaagacggcctaaaacagatgagaaagacatcaccccatgcaaaactatgaaatgtccgaacaacgacttacagaagagaatgcattcgcgagaagtgttacatgacctagaacattgttagcaagaagaatcattacctggtaccaagtcaaatacatacttcagcgattgactgccgctcaatgattgatttctgtctctcgttgcgcgaaacacggtagtaatagtcggtaaagtcaccacatttcatgtggcgcaggaattcttcatcgtgcgtgatgacaatcaactggaagttagcctgctgttgacgagtgcggataatgtcatgcagcgactccgccagagagcgaatattatctcggtccaggttcgtagtgggctcatcaagagcgatgagaccgcaattgacaccgaaacattccgcaagggcgagacgaatgatgatactagccaggaccttttggcctgcactgcatcgacctcgcatgtccatctcggcgcctgacttgaccatacagacgcggtagttgtatgatcgattgcccttggcgttctcgttatcagaccggatgaggattgtgtcgacatctgttccgcgatatgttttctgccacagttcgccagcgatagcgttgatttccgccatcttcaggccgtggtattgcatgattgctttgtcaagagcgccaccgtatcgagccaggtcttccacggcggctttggtggtctccactttgatgtgggattccttgtattttgaggatgcatccttataatctgtgttccagtccgctagcagctgcatcaactgatcgtccttggacttcatttcgcccatcttgctcgcctgtttggcagcaagggcattgtgttcacgagtccagcgttctgactcttgcttgaaacggcctcggtccacttcagcattttgggcttccaagtgctcaacttcttcagcaactgtgttgagagatcgagtggcttggcgatatgtcaagttgtcagagtattgccgcttggtgttttcgctgtccttgagttgggtcgagattttgttaatctcccttgtgatctcgctttgatcggcttcgagtttgccaatttcagcttcgatttcttgaagctcctgcttgcatcgttcaagttggcccagacctccccgttgattgtacgagttgatgtcatcattggcaaggtcaagctgattgatgttctcagataagcggctgatctcgtgctgcagatctcgttcacgctcgtcggctcgctggctgatatcatcgtaacgggcttgggcttgaagcaactctggcgtgagactttcgatatctcgatctgccttctcaattgcgtcccgctgctgattattgagtttcttgaattctttaatccggacgatcaggtccgctttcttttccagctggaatttggcattgtctaggttgctcttcacatctctgaattctagctcgagcttgttgatctctgaccgtgtcttttctttctcatttgtcacttttgttagagtctttttcaactctcgtgacttttcattgatgaaagcaatttcctcctgaatgtcttccagggtacgggcagttgaagggtcttgctgctttgcagaaagctcttgaatttgtgatttgatcgtcttgatctccacatcgtaacgcgcgatagtgctcactgtcttagcaagcccctcgacatcacgcttgctttctgttttctcgctgacctttccgtcgtgggtttctagcttctctagaagttggtcacgctgggattcggattcttgctcctcttgttgaagctccgggatgacggtctctgacaagcggacccaggtgtcgtatgatgcactagcagcgcgagcagtttcgagatcttcttcaaggctcttcagggtctcatcttcggcatcaaggccagccttcttgactagggcatccaacttctttgtgaaggtctggagttctgcatcgttcttgaacgatctttgacatgttcggcacagcttggtacgcttagcagcatcaagacattttgtaagatattctcccattccggcatattgatcagcgtctttgcgagcgagatcatactgtgcctggcgctccttcacaatttcagggtattcggaaggctctgcgtcgactgcttcgtggatttccttcacgcattcatcaagttccttttgacgctgcttgaggttcctcttggcagtcttgagcttgaactctacatgctccaattctcggctcacgccgtcgcgctgtcgctctgcatcggccacctgctttgattcgctatcgagagcttgttggaagcctcgctctaatgtgtccggcttccagtcgggaccaacgaccttctcgaggcgatcgctatgagctcctctcatcgtctgtaggctgcgttcgcggtccttcaattctttcttgaggtggtctaagcgagccaagtccccagccttcttggttgattcaatgagctcggtattcaatctcgagctttcatcctcaaggcgccgaatttccgcattggtatcctggatatcttgatcccaggaagcagtcttggctcgctctttcgcgtgctcaaggttcgaagtgatatcctccacctttgactcaagcgcagcctgtaggccctcatcaacctcgatttcattgagctttttttgatgggttgttgcctccttgtcattcgcagcaatctgtcgttttgccgcgtgcttggtctcttgaagggcggacttggtttgcccaatctcattcaatttttcttgaacctcgcggagctctttctgggcttcacgcctcacacgatccagagattggttctggtcttttaagaggcgtttgatcttctgcatgaaggtgtcaatttcagactgatccatcttctcgccaataccacggatgttgttggcacgagcaatctcattaatcatgttctgacgcctttgagactgacgctcaaagttggccttgtcgttctcaaactttccattctcagcttgtttcagcccaaggcggtgccgagtctgctcaatctgctccttaatttccatatagctttccttttgtgactcttcttgttgctggtattggacctgcttcacttcgaattgctccagggtagattcaagccattcatcggactcatcaagctcaactagatgtctcttgaggttatcaatggtggtttggatacttttagcttcgatgcgcttgccctcaagagcaccgagcacctgggcataactttctgattgcgtccaagccttatcggcaagctccgcgacgcgccgcatctcttgtgacatccgctgggtctcttcgcgcaaggcctcgatttcctcttgaagcttgatggatcgtttttcagcacggtctgctttgtctttgtcttctttcgcatgttgctccataatcttatatttgccaagctcctcgttctgcttcttccgcagtgctttgatgttgtcaatagccttggtgtacttcatagcctcaaatatttcgtcaaacctctttttcaacacagacggttcactcattggccacagactttcgtcctggtggcagaaaatgaccgaatccagtacggcctttgagacgcccagatactgcggcatgatttggtccagctcagccactcgcgatgaaatagctgtgcgctcgccgtttttgaccataagcagctggccttctagggtcttctgctgtcgtgtggttttcttgaccgtaagctgtagactgcgcgtggcaaccattttcgctccggaagtggccttgaatgacagcttcacctgggccagtacctctttttcgccacatagtttcgggtcgtggatgaaagcaccgcctttgctgttcggaggaagatcgcccgttgtggcatatttgagacactcgatgatagtctagatccacgtcagttccctgctggtcgcaactctagtcgtccatttcgccatttcgtactgtttttcctgagccattgtaaccgacaatcaatgtgagaggtgtgtggaattggatcgtttcgctgcgcgtattatcgaaggagcggactctagaacaagcgtggttttatgagcatgagtgtaattactctccgcagtggccgcactcggatcaaaagctttgagagacgtaccccagtatagagagcttatcaatcttcgctacagtatgttagatgaccgtttgttccttttttttcctcgccgagctatagttgttgcacttacacctaaacctcagttagcatcgcgacacgagacgggaatgatcggcacgtacatttcgaacaaaagctatgagaggggcgtgtgagcccgttggcctttagctttatcgaatacaatcgaataaaaagccaaacacagagagagctgagaaacgaaagtgctcggatcgccgttgaatgtgattgatcacatagtcccgcgtcgaggcgacacgaaatcacgtggattgcactaaagtgctgcgggcccacagggatcggcggctctttgtcaaccagcaatggccggctcttatttccagagttctgtcttttcgaggagatccagaccatcagtgagacgatgtgcatattctgagaggcgcatcgtcccaccccctcttgtctgaatgaaccgaacgtactgtctcgaatctggagaatgaaccgttccattttcaacgctcactctactatatccgtcccctcgtgcggtcatagttttttgagggaaatctcgtggctcttcatgagacgtcggatccagacgcactcgaacctattactagtgccattatatctcccttttaatctctctacactgcgctcgacatggctctgagtcgcccacaaccctatgagggtatgcctctacccaactaccagatgagatcgggctccaacgaggggcatccggggtacacaatggagcagcagcacgtccatgcatcctacggtgggctctatggggtgcaaggtgctcatcacgggggataccagggtgtacaaaacgacgggggctggacagaacgagttctcgatgaaatgaaggacctgctacttctcctcacaccccacggccaaatcacctatgcctcaccatcgtgcaagagtatcaccggccgtgtcgcaaaacaactcgagggaagtgctctggcacattacattcatcaggacgaccagccaatcttccagcgagatttggacgaatcggtggttgcgaaccaatcgttccggacccatttacgattccacaagaccaacggcacatattgtctcatggaggcctatggacacccacatctcgcaaaccaggatgagcgtgcagggagacccacgccggccaacgggcgctgcaccggatttttcctcgtgtgccgaccatatcccagcaaggtctctcaattgctcgactcttttttggaacacaagattgagaacgcacgtctagtccaacagattgccaaattgaagcaagaagaagatgaagaggcgaccgcgactcgagtgccctattctaggagcgaccaggatattcgtgcccccgtggccgaaaaccgattccaacgattcgctcattcgggggaaatttctagtgaccctgatactacagacaccgtagggccgaactcggatgaatccgacacgagccaatcgacgggctatttcgcagagcccaatacccgcgaagtttactcacatattgacggcatcgaagtcatgaccggtcttaactacgcagacggcgagagatcgcacggtctcagtacaggtgttaaccgtggccgtcttatacattgcgatattgacatcaccactgctgctgaccaagagcgcaacgctcaggaaggcgaccgccgtaaaaggctcaaggcccagcatgtctgtagcgactgtggaacagcagactcgccagaatggagaaaggggcccaacgggcctaagaccttgtgcaatgcttgtggctgtaagtattgtcccgtctgttgtgacccccgctcagcttgcttgtaacctgtctactcttggcacggaacgagctaacccaattgtctttctagtgcgctggtctaagaaggagaagaaacgccaagagtcggcctaattttcagttctcggtttatttgcttttcttgggctggtggcctgccaacccctcagttgtccgggtgctttgactggtcaggcatgctgtccatttcgatgaatctacaatgatcttcagacgagccccatgctcgctatcgcatgggtgatgatcttatgtcctgtgaaatggatctctttggtccgatgtatatagctggccgtgatttcttttgcaaacattgtgtactactgcactatggaacctatgtttttttcttggtaattcaaaatttcattatgaggaattaaatgatttgacaaagtcggagcaaatcaacagtccaacgcccaggataatgacggcatggagtatgtactgagtaggcacttgtggccaaagacaagcccacggagagggccaaaggaatgaacagaaccccatatgaacgccatctttgggccgttaaataatgaaggtgatgtatgggcaacaagacgtggtatcataaaacgcaagtggtatcataaaacgcaatttctcgacaaacaacaattcaacgagggcatttaggccctagcagccttctttggcggcggcgggaagtacatcggcgaccctgccgaactctccggactgacttcatacgattgcggcgacgggtattgaggctgaggcatacgggagttgtcccgcagtgggaggtccgatgcggtactaccattgccaagtcggttgaaggccagcgttcggggtgcgaagggcgagatatttcctccaacagccatgggcggaaccccgggggtacggggaaccatacctgatcgcggcattgggccgggggtcataggaatcatgctgggagacttgatgatctcttcttcgaactccttctcgatgcgacgctcttccctctgctccaggatcgcatcccgttcttcgggggtgatgaagcaggagtggatacagaagccgaggataattacatagtagacactgaaggggatgttagctaactgtttcctcgtagaaggggagtaaacaaatattagagtggaaagggccgaactaacaccatgataacagtcacagcaaacagtgctttcgcttgcatgcagtatccaatgttggactttttgtaggcgacactgcaacttttcgcaatgtaccacggggcccctggctgaggatgtctggggtctgacatgtcagacccagcctgatacaccgctgacacgatatagagagcgaccaaggacacgtggacggcgaccgcaacaggaggataaaacaggttcatccagtgggtaggcaattttgtgatgaggaagaaagtgcttaaaacagcaaggacaagattgtaactggtgatactgtttttaagtcagcggccacctcttgcatattgagtatgagtataatgagtaacttacaagctggaccaaaccatgggggccttgaatggtgtgtagttcgctgcagcatacaatgcctcgttgggagcactgttgaatccattgtctgctccatcttgccataataatgtctggtatagattatgggaagcgataccagtcaatgtcagcattacgatggtgatcggaaactccccagtcatcaaccaaagcacgagcttgtggtgcttatgcttctttggaaacaagaactgcattttggcgttgggtttggaaggttcgcaataaaaatcgactatattttcccaagctgaccgttcaaccgaagcgcttatggaagagttaaagctgtgtacaatatcagaccggccggctaagaccttctgtctgtcgcacgaaaagggctaaatgtttcaacgtggtagaggggtcagaaaagaaattagaagaacacaagtctgggcaatccggagggcgagcgttagatatgagctcgaggccaacaagtggccgaagacacaatccatcgcatgcaggaggggcacgaatcagcatgggaagagcccatgcgaagagattgatgtgtgtttgagaggtgcatctggccaatgcttgatggcggcaaagcgccagcgtaagtagcaacccggtcatcacaccaatgagacgacgaggatcgagggaaaccgccggtcgtcacacgctagcaggtgtgataggatggcagacctgcatgaagccctcaatcacatacttcccctcaataggatcagcgcacccttggcactttgagggaacttgcagccttccagtacgaagcgcccggcgaaccgctgctgggttgatgtgtcgcatttgtgactatgtagttgaccgtgcatatatacccatgctagccccggcgtcaggaaaatgggaacaaagaagatggcctctcattttcgaccatagccatcattaattcctaagttatcgagttctaaccttgaagttggaagtggtagttgtcgagtggcataaggaagtcatgtggtcggcagaatcccaacctgcgatctcaaatgcattacgatcatgccatcttttagggattccatcaactaaatccaagtccagctttgtagcatgatccatctcttgatatatcttgatgaagtcgttccagttgcgtccgcttgctcttcgctcagccattccaccccgcatcatccggcctagtcaacttgaattccccatttcaagaatcgcacgccaaatgagttcccagagagaggactcgattcctcatgagctgcgcacggctgcagagccccggcaaaatagactgcacccagtgcgattatcacacgtcgagcaggtcaacccctctgttcggctcctacagttcactctgactccccaagagaataatgtatggatttattttattttctcgtccgctgcctctttatatatgtccctatacccagtatcttctactcatacatcaagcccggctgccactcatggctggttgttgtccccacgccgttggatcccatatgccccgcacagtcggtggttccaatcacatatgagcatctgctatcatgcaccttcacccaatagatgtcgctgatgcattctacaggataacggtcaacagccattcagcttcctccctggccaatggcttgatgtccatattccctccaacacccaagccgggggcttcactatcacctccaccccggcagatgcggaggtgctgccgtcgccagaggcttctatagactcattagctggcgaagcgctagaaccatcctcagaatctcaagggcgaccaccatatgtagagttggctgtacaagactcgccgaataacccatccgccgcatggctgtggagaccaaaagaagagattctcggcaaggagctgagcatccgagttggcggaagcttcacctggcctcccactggagtcgatgttaatgatgttaagaatgtggtcttcgttgctggtggtgttggcatcaagtaagtgatacttccaagatatcatgtccgcgatgtatacaatcgtcatcacaaaccaagactatacttgtttcaatccctcatgagcaaattctaacacagtcttagtcctctgatatccatgctctcccacctaaacaacaacgaaccccacacccccaacccaacaaccatccacattctatactccagccgcctaccgcaaatccagggaacagcctcggcagactcaatactaggccagatcctgtttctcccacgtctgcgccagatagtccgatctcaagaaagttcgcaccggctgcggatctcgctggaccttttccttacggacttggtctcgtcgcctgatctcctctcatctgggtctccctctgatctcaagatccaccgagagaggatatctgatcgtgatctgcgctctgcggctgtgggtattgacggtgaggtggatcctcggagcacagtgtgctatgtatgtggaccgcctgctatgactgattccattgtggagaagttggttgggattctaggggatggtggggagcagcgagttttctttgagaaatggtggtgagaatgggacgagattagtaacgacgtgatatattcgtatgcgattaattgcagtttgttagtcgatgaatgaatagtcaacgttacagttcaggctacaataagaacacaataggactaggagaaatggcttcaatatttttaaaaagataagctcccccgcagatgccgacctgacgcaggcaaggggcggaacgatatatgtacaggaaaataaaagaagggccgccggcaagaacggaacgacagtatgtgagagcaggggcagtacagacacgctggcatctcaatacaatatggggacgagaaatggaaaagagaatagagagagagatagagcagtcaggcttggttaggatgctggctctgggcccttgacggcaccgccatcgacgatcatcatttcgtcgattttggcttcggtttcaccccattctagacgcttgtatgtggatacgcgaccggggcctctgtcgaagtcgaagaaacgcactcgtcgaacgaagtcatcgtagccaccatagccgcccattccgacaccgccgccatagcacatccagagagatggcttcgcattgtcgtcttgctcgagcatgcaatagtcattgacatgatcactagagaacggttagtctttaaaacagcacaaaaggaaccttggaatggatgacttactgtccacaactaacaaacaaaacaccctcttcttcgagggcgttcttgaagccagagttgaatcctggtgcagtaggaggttccatccatgtacccttgaagtactttcctgacgtacgatactcagggagcgggatgtgaataaatgccacgttcatgtggatatggttatattcctggtgtttggatcttagactttgggcggtgtttttgaaccaccgagtttggctcggtttgatccaatcgtagccgcggaactgacgctcgtcgggggagtaagaatgcgtgtcaaggaaatagagggtcagggcagagtgtgtgcttgagccccagtcgaggacttcgacaacgtagtttccgaccccgtcaatgtcttcggggccggcggctgaaagagagtaaggtaggtcctcgtatatggtcatgagttgttctcggttgaggtcaccctcgtcgtcgtggtttccaaagatagctgcgtaaggaatcttgcggtcgaccagaagctttacagacttatagagagcactttgtgcatctggagcggtctctccgttgatctggtcaccagagaagactaccatgtccggcttctcttcgtcaaggagtcgttcgacaaattccaaggttcgggggtcggcttcacacttctggccagccaccgcttccgcgggaacagggtcacgacagtggccgagaccggtgctcatgtggagatctgccaactgcatcaccttgaatttcccattgtcgttgattctgggaacaggcttcttgggttttgcctgcggatgccctcttcggatactaagacgagtctctaactcttccgtcttactatccaggaggataggagtatctttgacttcccagttgggacgaggatcgacagcatccgctccataaaggacatcgacgtacgtcacggcgttttcggagtcgctagcatggcgggaggacgagcgcttgagccagatgcctcccggtcggggttcccacgattcgacttcggtctttgcaacaaattcagacgggggagtgatacggctaattttcaagtcgatgaccaccttgtcatcagggcccaattcctcctcctttttccgcttgaattgaacgtaggcactcgagatccagcccgagcgcaggtagaggtccttgtcgacgcggtaccaggtttctgggtctagcttacaactcgagaacggattgagggaggaacaggttgtgacggtcacatctgtgatcacgtagccggaataatgcgatggaaggtggccatggattgaagagggaaggacactgaatcgattgtcgagaatgacgaccacgaggagaatgaatgttgcgaataaaccgagctgtacgctcgctcggacctacacaaattcgatgttagcaacctgcttcacaaggagtaaaataatgtcatactagccggcgagccattatgaaatagatatcaccctggcaaggacttgaagaaaagcgaggcgccctgtcgcatgatgcccacggatttcaaatgtatagggcaaaggagaggaccaatttcggtcaactctaggatataaaggacaagtataatttgttttgggggtgaagttgcaggtcaccctcgacgcttgggccccgaaggcggtgactcctgaagagttggtctagcctcccgatgcttggtgtttggatgttggtgattcattgacttggcgattgttactcttctcattatccattttctacctatatgtgaaattcccgtctatcatcaacattcgtatgcaagttgcatgtctatacaggtccaccggaattcctctactggccgagcgaagtcttggcagccacatcgcccactgacaccttgccgctcaatatgtctttggaagtcgagaggattgtggaccaattctggaaagtcgtgtagggcattcccctgcgctggcagtaggtcaccagatctgcaacggcgttagttcagtgtctcggaatctgttacggttcgcccagataaatacctttgccttccttggcgaagagaagatcagtttctgcagccgcagacaaatcggaaacaccgtctccggcgtatagaagaatcgggcgttctccgtcgggcaatctggcataaggcttgatctccagggacttgtcatgtccgaagtggctggtgagtgattgtcagtgaggctgggggaatgatgatcggattgacatggcttacctgtcatcatggtactcaatctgccaaccaccctcgctgttgatattcttgccatctcggctcacgggctcgttggaaatgatggtgaggtggctggcgggcttgtggccgaggaacttctctaacaaggcactgatgatgggtcgcattccagatgaaaggatgacaatgggaacattgttttccttagcccagtagtagaattcctcgaagtatgggtccagtttcatgttctttaacagcgtgtcgatgcactggtcgtatggggtcttgatgctatcgagcatctcgcggaaggcatccctatagtgaagaaagactcattagggcttgcttttggaacagacagtgtctttaacactcaccggaagctcagagtctcgtcaaggacctggtcgttcaacacaaggcgcttttctcggccgaagccaatgttatcgatctgaatagcattagtgaagatctaggatttggcagcgatgcgatataccatgaagtcattgcctgcgattccagtcagcatgcaagtactagcactttgcggggaagcacctactgtcgtcgactgtaattgtcccatcaaagtcggtgaaaaagatgagcttaggcttagtctccatgtaggggagagcgttggaacccatgatcgctatatatagcaatagaaatgaatcgcagtatgtacaattcagagaatgactgaagaaaagcaggcgctaaaattaaagatgtgcccctcggtgactggggtgggtcgagcggtaccgcagcgggccagtctcagccggattttccttttctgtttattccagggctagtacttcacatttattgtttccacatcatgtctcgtctgcgccaggccctgcagcgcgtctttggtgtgactcctacaccaggcgccttgcgctctcgaaccattgacacgaacttctccattataaaaggtaattgtgtggcaacgcctcttcgcaacgtcgggctaacgaaacgcgcagagggagaccgagtcattatacacggcaaacagccctcattgtcaaaagcattgaagcgaggtgaaaagcttcagactgctcgtggagcagtggaccatgaaagcatcattgggaaacgggtctgggatacggtacaggctcgcaaaggtcaatatcctcacttctcgattcttggacatgacactgatatttttgttatatacaggcccgaacatccgagttagcctcccaacgttagaagaatacgtcgccctgacccctcgcttggtcacgccggtatgcgcatcactcttgtgaatcagacacggagatacattggactaacgctaccccagtagatctatccacaggatgccaatttgattgcttcccttctcgacatccatgtcaacactcctgccgctggcgaagtacaacccactctggaaatcctcgagtccggaacaggccatggatccttgacactacatctggcgcgagccattcacgccgccaataccactcctccgcctcgtccacctcgatcccagatcaattacctagaaggccgtgtcattagaccgagtgaaaaggacacggaacaaacaaaagagaaacccgccgagccagttgcggatccagcacaggaggaatgggatgcatggcgagcgcagcgcaatgccgtcattcacacagtcgatgtatcgccaaagttcgctgcactggccgagaaaaatatccggggattccgccgtggaatatacgcaggcaacgttgatttctatgtgggccccgttgaacactggattgccaagcagaagcagcagcggaaaaagactggcctggctgcgctgactggaggtaaccctgtagatccgttcctttcgcacgttattctagacatgccttcctcaaacctgaggatcccacatgttactccgatgttgaagcgtgatggcctcctagtggtgttcatgcctagtatcacccagattggcgagtgtctgcaactgatccgggaccagcgactgcccctcgttcaggagaaggtgctcgagcttggctctggaatcagtggcggccgcacatgggatgtgcgttttgcgactaagaagtccggcgccgacccatcgtcctggactgccccttcagatgctgaggctgccagtcctgcggaagccgacgagcagtccaccacctccgatgctgcgtccgaggtgtccaccacagaggagcctgcaaaggaaggagagtctgtcttggtctgccggcccaaagttggagtgcgtatccagggcggtggcttcgtggcagtctggcggcggatcgaggaacgttatcccaacgtataaaacctgtactgtatacctgtattatgttgcatgtctgatacggattagacccatttgtacaatatagagaattgtgagaataatatcgagatgcccgaaaagatgtcataacataacaagagacaatcgcttcagagcttcgctttaccctcgatatccgcatctttagacacggcagtgtctatgccaccttcaccttcaacacccttagcagcctctacttcagtctgaataaccactccctccgtcccaggaactttgcccaaaatccaagccttcacatcctccaaaaagctctccgtcgtctcaggcaactcagcatgcaatttatgataagcgccctcataagaacgaagcttcacatcaccacccttctccgtcaaccccttaacaaagttctccgtcgccggatgactagtaacgcgatccccattcccatgtccaaaccagaaaggcagctcagtcttcacccaagccccatccccagccgcaaacatcccctccaaccaaataccccggtccaacatgccggccaacccctcgaaagtacccgtatcatggcacagcgtatcagccacgaactcgtcaaccacagccttattgcgagacatcaaatttgggtcaagcggagagtaccgctgcttatgcgggatcaactttgcaacaagtcgccccgctgagactgtcagctttgacgggcgggaggacgggtctatggcgattaggggggaatacagaagcacgccggtgaagttgggccgcttggatttgtctccgttgtagggtgactctgggtggaaaatgtagtttaggacttggccgccgcccatgctgtggcccattaggaagaggggcatgtcagggttggcgggtaggttttgcaggaaggagtgcatgtctgagaggacttggggggttgggcctgttttaccgcggtcgcggctttctttgacgctgcggccccatcctctggttttgggtgttagttggggtgttttataatggaataggtcgttttctttgtgggtatttatattgagatatcaggataggattcggccttggtttcacacttaccgctgatcgaaagacctgacctcaatgcctgccgatgccagtgttggaaacagatcgtggtaggcattgcctagcaagggtttttcgtcaatgactgtcttatggatggtgggttgtcttgacttattgctcataacagacatgatcaacttacagtggtcactaaagccatggataaaagctagaacagcaagtggagacccgctagtctatatagtagatcgccttgttagctttgaaactcaatacccttatcttgaggttggagtctatctcagcttattcagagagggatcacagctgtgtcgttaaatccataccttccatgtcttagtatacagctcaaggccgtctgggagaatatgcacgctttcttctgtagtcatttcggctattgaggtttgtataaaagctcgagaggtggttgggaggagacgaagtgcacggtgcacgtttcagcatgcatatacgggacctcggcaggaatgtgaagccaagatactaacgccattcagatccaccacgcccgcaattttatagttaaccctatttatacgattttatatcttaaagaatgatagtccactgcgtttggagactctatcattgacgatgtgatctagttaggcctattgtagtcttttagtggtcttttaagatatcttcacccccttcttaagttttccaggtagacagtagagaaaaaggcgagaaaaggcttgatctgaaagcactttgatataatctctaattatgtatatcctaacacaactattatacagagacaagaaaactatagcatagaatcgatacaatagtatcaaccatgtcccattttctagatgtcagctatagatcctacatccttttcttacaaaacttgccagcaatcttagtcgactgtaactacctcttcttctttgtcttttgattcatttctgtattcagtccatgatcggacggatgggtaagaagagcctccaggaatccacgggtcttcagacccacttaccaagatcttattggttcctagctaaatatgtcttgtccaatcatgcttcgccagtgacatacttctctactatatcatgtcaaaatgaccgtcaacttcttgtctgtcctattttgttaccttttaatctttcaatcgatgctatattacctgacaagaagaggtccctcgatacttaggccagcaatctcacaatctctgctgcgccctaaatattcagaaaggatgttctccgccgttcctcaagcggttaccaaccaccaacccaatgtctcatatcggtctctagcattatccccgagtgaagatagcccagatattcgtcagaaataccgaccatttatccttgatgacgagccaactgaggactgggtcaacaacttagacttggccaccgcagcagacatggcagaacataacctacaagtcacaaacgagaggctgagagttctggtactctatggaagtcttcgtaaacggtcatattctcgactagtggcattcgaagcttcccgtatactcttccggctcggctgtgacgtacgcgtctttgaccccgagggtcttcccatgaagaacgagattgatatcgcccatcccaaagtacaggagctcagagaactcagcgtatggagcgatggacatgtctgggtttctcctgaacagcacggtaatctagtgagttatctctcgccatagtctcaacatttccgcattatttacttacaggttttcctgcaactttagactgcggtgttcaaaaatcagatcgattggatccctttgactactgggagtgtccgtcctacccagggccgaacactggctattgctcaggtgtgcggtggatctcaatcgttcaatgcggtcaactctttgcgtatcctgggtcggtggatgcgcatgtttgccattccgaatcagtcttcgatccctaaggcgtatacacatttcccagatgaaggtcaaccgggggatcagcgactcatgcctagtggcaacagagatcgtctggtggattgcatggaggaatttgtcaaatatactattctgatgcggcctcacatcggtctttttggtgaccgttttagtgaacgggaggaaaggaagggaaaggaagcgaggataaatgtaactacggctatttgaaagaaattgaataatagtgtgtcagggaggcaatttattatggtataattgctcaacatactttgttatcatagctggcaactcgatggctaaggtaaactatgagcacattcgttatttgattggcaaattggattcgaattctagaagatactagagatacctgaccaatatcaagattagacctttattcagatgtcatttgatgagacagtccgagcctagcatcaatcatccagcaaaccattccactccggaatctcctcgatcaatttccacataaaattctccagcttattggcacatttggtgtataccgttgtggtaccattgaactgccgacagttactgaaaatcaatctgcaatcctcgacgagcttttccggggtggaataaaaaccttgctccaatcttccttctatggtcgacagatccatgggtgatacgataacatcgtaataatcagggacttcatctttgtcgactggtttgacaaagggccaggcatgctcgtggttttggatttgattcagaaaacgtcgaagttcgttgaaatgaggtccatggcatggcttccgctctagctcgtccatagctggggtccagccagtctctcggatagcagggatagaaagcggatcgagtggagtgataacgccgttagcccattgctgaggtggtttatggataacatggttcttgctgaaggtacggattttggccagaacagactccttctgcttaagaagcatacggccagcttcgagataccgtatccggggaatcatggagcattgcataagtgtgcctccgtcgtaatccttgatacaccccatccagatagatctatcgagcgtgatatctttagtgaaaccttgctttcgaaaatatccgatagcgtggttgtcagcgtaagttaggaaattcatcactggggaagtagctttgacgtaatctttgaaatgcgccatgagatgcgctccgtatcctttcacctgatggtcagattcgatcgcgaagaaaacaatttcggcaaacttgcgttctcggaattctcggtatgatattccgccaatgacctctaggggcattttgacaagtgcgatagacaaatgagaacgatcgtaaacaagacgagcgatgtattccttaggcatattaggaagttgcttttggaacaggcatttcaaacccgtgaggatgatcgtactctcacgggagccatcattgttgacgactcggaactcgatctcgccatttcgttcttctaaaacagccggcttaaaaaagatatccgttagaacattctatgcagcctaacatttgtagttttagcataccttgtctgggaaaggaacccttccgatcggggctggaggttgaacatccggtgttgtcgaactatcgcgagagtcttcgattctttcagcctcaggggtaagactcggtgcttcagaagatgtccgcttcgccaggagagcttccctgctgtccgctgaagatgacagtgactctgtgtcgatcatctttgttgaataccggcgatcatgcgagatgtaaaagcaaactaatgcaggtgagcgggtgtgaatgagcgctctgaagtcgctacaaatgtcaggttgacaagagtccggacctcttggtaagtggttggcttgataattgttccattgtagcaaccatcgcgcgttcttatggttacgatcttttggcctagttacttttgcaaccacttgggtgccgcagcctaagttcacggattgtgcactgcctgcgaacaaataaatacaacgatatgtatcaataataggtgctaaactccttagaatgtcaaatgctgtatgatactagacccatacaaattgagaaaactcaaaacaggaggtcggggggcgcgggccccnnnnnnnnnnnnnnnnnnnnnnnnnnnnnnnnnnnnnnnnnnnnnnnnnnnnnnnnnnnnnnnnnnnnnnnnnnnnnnnnnnnnnnnnnnnnnnnnnnnnnnnnnnnnnnnnnnnnnnnnnnnnnnnnnnnnnnnnnnnnnnnnnnnnnnnnnnnnnnnnnnnnnnnnnnnnnnnnnnnnnnnnnnnnnnnnnnnnnnnnnnnnnnnnnnnnnnnnnnnnnnnnnnnnnnnnnnnnnnnnnnnnnnnnnnnnnnnnnnnnnnnnnnnnnnnnnnnnnnnnnnnnnnnnnnnnnnnnnnnnnnnnnnnnnnnnnnnnnnnnnnnnnnnggggcccggggcccccgacaaagtatacaaagagccacaattattccttccagtagcattgcgataatatccaaaccaaaatgtccacattcaatggcttagaaataacaacagcaagtcgacccatcccaccctaccaaaaccccatctaacccaaccaggcctcaatagtcgccgcactagcgagcgaaggagccatccacccaatagacacagtaataacacgcatgcaatccccgatgtacagcagcgtctacaagcacctaaacggcacactgagccgcgcactcttcagcgggctataccaaggcttcgggccaaccttcttcgcaggaacactctcatcagctgctttcttcaccgcatacgaagcctcaaagacggcatttagcaatgcacaggccgccggatatatgctcggcgtcccgcggccgctgatccacgttgctagtagtgctgttgccgaactgcttgcatgcgctatccagaacccggctgaggtgttgaagcagaatgctcaggtttttcagcggccagtcaatgcagacaggggcccgtctccgacgatggagatgttgcgaaggtttcggaaatatccggctgggttgtgggccgggtatagtacgttagtggcgagtcaattgccggggatgtgtgttacgttctgtttgtatgagatgttcaaggaggatttgcttgagcggtggaagacggggaaagatgatattagacagcagcttgaagcgactgttttgggtgctggtgctgctggaggttgcgcgtcttggttgtttgttcctatcaatgtggttaagacgaggatgaggcttgcggttggtgatcagatagatagcactcggtcaggtctcaagggaaaccctggcttgccatcccgtatcggggcatttgctattgctcgagatgtgctgcggaaggagggtgtagctgggttatttcgggggtctgctttgacctgcgtggcagcgattgtggggagtggactttatattgggtgttatgaggggacgaagatatacttgtgcaattatgaaggctcatagttggcatggttggagattattccaagtcaaatgtatcttaataaatgtataatagaatagaattactctcctccttccgtgttgtcacctaatagaaatatgtaatgcggtatcagcaaccataagcgtatagtgtcgcgatatataagcatgtaagggcatttcaatctacatgtatcagcactctactggccggtctacatagaacaccaaaggttgaaatgaacaaagccatgctctattcttgattgaacctcgcataggacgaacggtacaacacatacataacagacaaaactcccttcgcctggaaaaagaaaacgaaaagcaacctcgtcacgggcaaaaagcagatacccttcaccacctgttccgcccgaacaccaatccccgatcctaagcatcgtgaagccgtctcagatgaggttagagattaggtgaaatgaaaccgagataaatcaggaaacttaaacggaagaagacacagaagacatagagagtgaggttaagagatagagagatgggtttggggggggagagaacgccagggagtaaatggacgccgtctcactacatcaacgacacgaggcaagaccattgttccaggaacagatactccgctagcaaatcaagaggatacagaggaggataagcgagaggaaacggaagaaggacgttcataagcaggagagagaaaacacaagaaagaagaaaagagatacgtaaagaaacaccataagacggctgactagagagccaccacccaaaaagattccgaaataacaagcacgaaggaaagaaaccggttggaaaaacaccccatctccgaagatttcaaatgctccatatcgttagtgccgttgtggcccaaagtccgcctctaccaccttgcccttcttgccctttaccgtaaactctgcaagaagcgcgacatgatcactcgggaagtggaaattcgggaacccgggcacgcggcgcaggtattccttgtccacttcgccgagcagcgccgagacatgcagagtgttggaagagtaccaaacataatcgagaatggctgtgaagtcggatgtataattggtgaagctcagttctcccatggaggagtaggctgacttcaacttgaagggatgtgtcatacccacgcggctgaggtttccgtaaagtcgcttctccaagtcgggatggtcttcgggaagtcgtccagtggagatcaagttataagccgcagacccaggtgaggagttgaaatcaccgcacatgagaacagggatttgatcgccactggtgtactccatcgatggggcaggttccaccacaggcgcggtctctgagccactttcggcctccgagaagcggaatgcggtcttgtccgtgcaggcgggccatttggcgtaattatccgaaagcttggtgatctcctccatcagaatcgcagtctggatcagcttgacgtccttgaaggcaggatcccaatacagatgagcgttgacactgatgaagcgagcaccagtttgccggttttctaagaagatcacaacggcgatgtggtccttctgccaaagtcggttgtagatatcatcttggcccttggcgtcgggtcgacggacggctgtctggccaaaattgatcaattgcttgtccaagaggatgtacttgcttcccttgaagaatgtagcacatccatcgaccatccgggcatcttcctcttgcatgcccattgcacgaccacgtggccagtatacacctttatagtcattgtaggcaagctgttcccggaagaaattgttgtaacttccctgatcaacctcctgaaggcagacaatatctgagttgtgggatcgtaattcgttgagaataagctcgcggcggtattcccaggacaggacacgtgagggcacatagccgtagtgcgattgggttgcggaagagtcacacagggtgttgtacgacaatacggtgatcttttcggtattgctgttggacgatgttgaagtatcatcaaggatcacccagtcacgatcgggaggaggtaggtggactgtaatgataaagttagcaaaaaattgagcggaggaagcaggtagaacatacctggcatctcttctttcaggtacttgatgagagccttggttccatccttcatgatctgagatttcagaacatcgttcagggggttaccctcgatgcccaaggtttccaaccggtaaaggtaccccatttcgtaagggagagtgcgaatgttattatcgaagagaaggagtttcttgaggtttgaaagcatgccaagttctgctggcagctccgtcaattcattgcccgacaaatccagatggttcaacttccgcagttgtccaatagccgggggcagcaccttcaacttgttagagttgaggtacagcttctcaataaaggcatagttgaacaacgaggtagtcaaagcgcgcaatccttgaccaccgaaatcaagcgcattccaaccctgtcggctagctggcttccccgcagatgcaccatttcgcccatctgcgccgttttctgtgtcggtgttgctggacatgagctggattcctttcgtttgttgcgcaatgacgcgggcatggtagtggggagaagtagcttgtctcgattctgccgcaagctggagctgctgctgccaatgctcgttcattgattcatcaaggtcatcgtccgcggtcggtactccgttctgcaaatgagtcgaggtgaagtgagaagttgtcgtcgtggccagtgtgccgccggggaaattgtgttgatgggtgaggttgtgggtcgcttgtgagtggtgggcatgatggtgcggttgctgtgtatgatgagagtggtgggtttgcgactggaatttcgggatcggcatgccaaaccgctggtgggcttgaccgccattcatcataacatgctggccttggtgggtttggccgtacatgttgttaaaagggctgagagcagcagcctggttgagggcaggggatcgagagggggagggggtgtcgttgttgaatttcagtcgacccgtcggagaattggtcccgtttcgaacaatgtgtcgctggtgagggttctgctgtgcttgtgcttggaagtagaactgcccggccccaggctgctggaacctgtaggtaccatctgccatttaacgtggcagacgagaccgtgatttgtttcccggatggaaaacctgttggttggtgggcggcgctaagttgagttgggtcgagaagaggagaggagaggatcggaggcggtctcttctcttcttccacatagaggcctaaggcaaagaaacacctgtatcaaaccacaattggaggtcgccggaggctttggcactgagagtatctttatgtgtgcaatggagcggtacctaagggcgtagattgggcggaagggtcaaaagaaggcgtgatcggaaaggcaaaaagagatcgagtttggtgatgagttgaataaagaccagtggggcacgattaacgtagcaaagaggagcaaaccagacgattgtctccaggtcgatgaggacgtcctgagatgacactggtggtttgcaacgaggcgggagtcacgagatcacgtgaatcgccgcaagggccaaagtcttcccagctttgatgaggttgaattgccaagacaaaccggttccctcaacggttggaagtatctttgatgagagattggatgttgatcacatattcttcatctatcctgcactttcgtattactttgtgatcgatgggactgtttatataaaagcagccacgtggtcgccttgcctgccaaaactacgggcatacgcagctgtctctggcgacctaagtcgaagctgcatggattttgattgtgcctagacatcttgtttgaagctagccaacactacagggtgtacaatgaaaggcatcgggtctaggatggagatatataacaagtggccagacctggaccagaaggttgaaagaatgagcaacagcctgatctattctaagcctcgctaataatatcctaaacttctcaaatggagtctgtctttggttttgttctataggtcataggatcctgtgtcaaagtacaacaaggtcagtgaacctcttggcgtgaactgcttgggcgagacactatgttgcaataataatgaatggactgattattcaatccacattccccaaattccacaatcgtatgattaaggagtatacaacataggccgcttctattactatgctgtatattgtatggtgtttactccatactagcagtgataattggctaatgccttggcacaccaccctaacaacataagatatatggggtacggagttgaaggatcactatcaaacgatgtctaaatagagggttttctataaataattccaatcctcaaataatactccttctcaccttgagagtcctacgagtagtgaatatagagatatgtgtcattgagatgatctatgtacggctgctgcaaggtatcacagacctagtataactcgcatattcacaaaaaaggggtatctgcagcttaatgcaaccacatgctctagaaattaccccgtacctccatcttcttaccgatcatattcgcctcgccaactccgtctatattccgtatatttccgggtcttcaaaaatgaaactagtcctaaaccaaagtacaaaagtacgtggcagacgctattgtgtcgatcgaattctcgtatcattctgcaggtacgttaatactaccctgcggaaggggcacggatcacactgcagaccaagacgatcgcgtggaatagtccatggacaagtgcctgggacttagcgtagggcacggggtaagccggtagattccagcgttgtatcagataaagcgacagctcagtctcagagtgtcggggcccagactgcggatccaataaatcacttggtgatggatatggcgggtagggatctccgtgtgtatccagttttaccgtttgaattggatacggagtacggagtacggagtacatacgagtctgctagtactctcctggctacactttgctttttcttttggatgtatcttatcaatcatagaaagcattggcctatatttaaggacgttatactccggacctcgtatatggttctagcccctgaagactatatagatcaaaaagcaaaagcgacctaatatgcaatagttatacaacatccatcacttctatactccgtagtctcgacccgttaggccagcattccctttttggcgagggaaccatgggttatggcttcaatgagagtcatgatgtcaagaccggtataaaaatagggagacactcattcgcactcttcacgttcactcaatgtcaaggtaaaacaccccaatactgatattttactaccggagtaaagtactgttactgttaccgtgaagacacgaacagactaaactagactcgagtggatatcaacttccaggggtcaggtctgcttttttcttccctccttcccccccatttcttcttggacttctcgaatactcttcgcttcgaaggatctgcgttgtacgcaaatccaaaggattatctgcaggctcagtccttttgttctgacgttgaacaagaattttcagctttgcgaccggctgcgctaagaataatttccgaagccgctttggtcccctgtcacttttcctgttcgactctattttttcgatttttcgttttattttattttatttccctcggaactgtcttccactcgaaaaaaaagcattaaaggaaaagaaaagtatgcctcgttcatgaaatcagtcttgcgccgagaatgcgaccgaacccacaacccatcttcagagtcataggggacaccaatcgatacacttgaagtgatatggacgtaatggcgttggggttctcagccgcagccgcagccgcctccggttccgacctacactccaacatgagctcgacactggccgctacgtcctcctcgtccttgagttcactcacggactactcaacataccctctgatgcgctatggtggccgcacctacttgcgcgacccggagaacgtctaccctctgccttgcgacctacccgagatccaccgccaaagcttgcgcacgctgatgctgctgcgcgtcctcggcggcccattttgcaacccccacctagccagtcggccgcccaaacgcgtcctggagatcgcatgcgggtctgggctgtggtctggtctgtgccacgactacttcgcccgcaatggccatcccgatgtggcttttgccggaatagatattatctccattgcgccggatatgcgcaagcagggaatgaattggcaattcaaacggcatgatctgcgtcggccccgcttgccatttccggacgactattttgactttgtattcattaaagatgccggcatgtgtccgtacagtcccgcgcaatcagcatcgggcttgagcgagcccctgcgcgtgttaaagtccgggggcatcctggaggtgtgggattcggattggagcttccgctcgctcctgcccaatccagccccggcgcggaaaaccacatcgaaggaacaggagatcgccgacgaaacagctacctatacattctcctcggccacgccgtttacacgagcgcagaacaagttcgtcgttgattataactcctgggtggaaaagtcgttcgaccgtctcaagttgacggcgctcccgtgcgcaaccatcggtctatccttcaactccgaagtggacttgctggaaaatatagacagtcgccgcgtcgcaatcccactaggtgacttgcgctgggagcgcgacggccaaggcaaggattccaagagccgtccacgcaaggccctgactccagagcagatgtccatccggcgcacggctcttctcaccacaatccagatgattgaagggctggagccgatattgatggagtctagcggaaagggccgggacgaatgggaccgatggtgggctgcaatgacagccgacctcttgcagaaaggcggactcgccagcggcgagtgcctcgaagtgagcgcctggtggggtcaaaagaaatgaaccccttgagtcaatttggagttccggtgggcaaaaagtcaagtagtgaccgttctgcactttttattggtgataccccaattttatttctatctttctaggtttctaacatgcacatgatctggacatttttagagaggtgagagtcatggaattatcaggcctcacttccatatcgctttttcagcgttcggtaccgcttcaaatagtacctggggttttgtttatcttgttagttgccatcaacgcaaattcttgtgatgggggtcaaaatagttcttgcatgatgccatgataatgaggagtgaacctatgcacagtgtatctagccagacactacccattatgggtgcaatgtatagaagaatgacatgtacgaatgattccacttccagttgtaatgaagcaatataggcagtgaacgaggaagatcggacgacaatgagatatatagggtagggaaaaagggagggttatagggaacagtcttacagtgcttccacttctacattgaacaattagcaaatatcctgcaaccgagtaaaggatatgaatcccagggacatagaaagcacccacctttcttcacaaactccgccctcgctattccctttcggatctgctcatcgtcggtaatctgagtctgacttgcaaatgcacggtgtagacgatcccggaaatactgatagcccagagggtattcccgtcccaagaacagaagctctgtatctcgggtgattagcatgtagcatgtaacagatgacgggcttgcgactgaagggaaaaggaatccaagttatacggcttcatacctttgtagacgttaatgacctgtcgacgtagctcaagatttaccattatcgttccatccaagaactaggatagttgaaggatcaacttgggtggtggggatgcggtgcattaaaggtaggcggctgagaagcttccaaacctcgggtgtatcggtgacgggcctggcggcctccatgacatatactaccatattccatgttcttggggcaatatgtattttatttcttgggtttacgtttacgtacgaaactatataaactctgtaattataccatacatacttatagattaatatcaatacagcttcggttcaaacgccctactatattcacgcggggttctagccgacctcggccccaagcttctgtttatcggttatcggcggacagcggtctcgccgaatccaacaccgcaactgtctctctcaacaaccacgcgcaacatgctccctcgatcagccttccgagcgcagctatctgtctcaatttctctgtgctcgaatggcgggcgtcgtcttttctctgcgactgcctcggcacacagtcaaaacctccccgactcggccccgatcaatccacgatggctcacaatgaccaagcgaaggatcgggaagtgcctgatgtttgggatgaagccagctcaggttgacgaggggggcaagattttacagcaattggctaaggaatggcgggaattgatcgctgggagtgagggattcctcacggataagaagcgacgtagtttgtttcgccatagtgttgtctggggagaacaggtatgagttgggatatattgctatatatacgatggggatgagagtcattaatgctaagtctgactgttgtggattaggatattatggtgagagcattcgtgcccctagtgcgcttacagcatgcgctatcttggatttctggactaaagctaactggatgatagggtatgctccgcctttttttttaaaaaaaaaatatttactagtactccaattcatggattataccgtactaattagtccaaggtcacgtcaacaacgttacctatgttcgatacgcggagaccgcgcgagtgaactggacgcgcaatatgggtaattatatcgatccggcaaacaagaaagcatggataaacatgctttgtaatacgggaatcgggctcattctgaagagtatcaagatggattacaaatttgtactgtatccctgagacccaaaccccacactactggaaaacaactaagtagacctatttacttactatcacgcagcccatggaatccccagacaaaatcaccgtttaccaaaagctgctcccagacccatctggacatcttgcatcccaatcggccttccgattcgaggtcatgatcatgtctgaagcccaccaacgccccgctgctcgttgcttcgaggataccgtggtctatgactacggtaagaatcgcaagaccgagaatatcccgccgtttatgatgaagcagtttgagattatgtgggagcaacaggagcaggagaagaagcactggagacggaagatagctgagatcgacaatcgggttcggaatcttgagcttgagagctgggatcgggttgatgccgtggaggataacgggtctgcgtcgcagtgatcaaagtgggggaaacgttgaagagcggattatatgggactccttgattgacacgttgtaaatacgcattcctcaagcatacctgactactgatgaaatctcggacgagggagatatggtcataatattaatggtagcagcggcgatgaaccgacatctcatttaagaaatgatttgggcaaaattggcttagaacttgatccaggtgtaattatacaggatgagaacccacgggtttgaatgtcacatcatgtacatacatgcacatctaacccgtgatcaaaaacagccctaattcatgattgaactgctccccagggccacaacactgaatctacccgttattttattcgcccgcagacatcagctgggtgttcgccaaagaaccattaccatacgaatcagaaacagagatccacctttaactccactagtcaaacaactcaaagtttcaacctctttgcaatctcaatcccctcggcaatggatcccactcgtgcatcaatcgcatacccttcactctccaacttttgcaactcagccgaaagctccgacaccggaagcgtgaaacattcaatgaactcattatcctcgagatcaggctttggattctgattttccggaagagacatgtcaacctgaacgtaaaccatgttgaaattggcattgcagaagccgggatctggacaagtatcttaagtcagctaatatccagtaagacgaacagcgggcttaccaaccgttatacataatgccagtggttttatcagaaacgccgatataccctgtctcttctttcagctctcgaactgcagcttgctcgattgtctctccggcatcgatcaatcccgcagggagttctataacgacctggtcgattggaggccggtattgcttctccagcaggatctcagcgccgttcatattattcagaaaagcgacgatgttgactccatcgacaggggagtctgtgggccttgtctacgatttgattaggtctttacagttgcatttacatataggttagaaaatcgtacctggcgttcggcagactcccagtctctcttgactccattgggatcgatgtagttcgttttgactagtcttttccatttggcttcttgggaggtctaaggccgtaagtagctgagagtataatagtcgggttaggagcacataccaagggctctcgtgagagaaatgtggacttaagttgcgtcatttatgtaattgcccctcggcttttcggaatgggaattgcactgcgagtaactgtgacctaaatactgggttgtaagaatgtcccaattgattgcaatcgtctaaagcgggcagtgcccgcgggcggggataacatgatgactaatgcggcgctggacccccggggccggggccgggcctgcccagattgacagccttaggaatgtcaacgcgtgtttttttttaaacgagctaccgtagcatatcatttatactcattccgaatgggattgtcaatcatctttgcctccagaaatctccttggtaacattgtgttcttagggatattgcctatgagagcaccgctgttctacacgcatgacagggtccgcatgagttcatcaattataaacaacgtcaatccttgtgtcgctgtctgtatttattataccgatccccggcgtcaccgttgctttggaatgtgaaaggattcaccctggacctactacagcgccgatgtttaccccattagttagcaaagattatcttgggaggatgaatacgacagttgactatcgtgctcggaagatcagacatagacgggtgtttatactgagtctagttgtattggggactttagtgatggtttaggtactactacatgcagctgtatatcggtacatatgtagttccaagattttaggtgtagtagtaatttgattttggccaagattggccaaagtcttggttgaagttaaagttaacattatgcgggggatggaatctgcctagatgagcttcgggttcatttctcatgtcaaagtatacattttcatttattgtgaagaatcttatctatcccttgttcattccttgagcatttcatatgtcgctttctttctctgacatttctacagtcattgctggatgagaaagagatatctaatgcatatattccgttttcgacatttcaagagtacacataggggccatattttccgatccatatctgttttgagatatactatactagaggcagtattcatgtgtatacctgtggagtataaatttgctgttaggatcctagtgtttcaggatacatactaactgcatgcggttaaagtaaactttaagcaaatttgcctcaatgaactacaaaagattagattgttcaattgattagactatgaatgaattatagaggctaaaaacctccacaagtttagccacttccgtagcaattactggactcaaagaccccgccacaggaggggagagccgggattactaggaaagcgaaaggatcgaccttgaaaacccgaagtttatcggacccaagcaaaacccggttctaaaataggcaaggcggacgcgctagtggaagtgtctgcaattgtctagaattgcctatgcagcttattgttctgaactggggctgaaaatctggaagtataaaatgcgaaagaagtgatcgagatggtgcaccctatatactccaggtgagacaatggtagggctcatcgtataaaaataacttaagccatcaccaagcccagccgtcgggccgatctttactaagcttgtggctgatctacgaaacccttcagggttgccaagcccgggtatcgtataagaggggaaggatcggaattggcaaagactgtacggcttctgtcttttactttaggatatcttctttacagtgtatatagatatctagtctgcacgaggcatcttgatatatccaaaaacgtcaccatttggagatctaccgacccatgtactcgtatgatacggagccttcaggaagatgcacgagatagccgagcatgtgatgatccaagaaagaatgtggacgaccctgttgatacacacctttgatacacacgagcttcagttccccgtacttaatcccatgatgctctccaggttcgggattgcgtgttcatacatgcaggcgcatccgcaagcgagtccccatggatccgtaacacatatcataagtccggcacaagactgaccccgcagcagacgggtcgagaaacggtcgatcgacaatccaatcagtcaggttgacagcaaatagggaccggttatctgaacaggctttcaagttgatctgtataccgtaggtactccgtcactagcttatcagcactagtcaatccgttttgaagaaagtctatatagcgccgaggcaacgaaaacatcagtatcgtaaactcggctggataaagcgaaaacacgcttaggattggccaatgtgcaggtatccgcgctgcaggacccggcaaccacaagccgtatagctcctatatagggggcgtgacctgtcaataagccccagagtatcgtaagatacagaggccaaagaaagaaagcttggcagtggattggccgtattgactgggattttccatgcagcaactccagatcgacaaagaagccacgggaatatattaccaggagctctttaattgaatttgcaatccggcgtcgcgcaagtagacagtaccgacgtgacatagtggcgaatggtattgaggccaggtaccgcctacccgaacggcaccagtgatcgacactgaatgacagtaccaataccaaattctgtttctttcgacttcatacaattccacctgggcactttttccccttcacgcttccacgtagagcgtcgtctcttgccattctcgctcatttcttcttttccttatacatctacttaccatttctttctcatcttcattaccatacgagccactctgcaccatttccttccccccaccatattcaatttcagtccgttttcgcctttttcctggtcccagtccttggcttcatcccgccaagctgactcggacctgggtttcgggctccctcgtccatgacacgctccgctgcatctaggaagaaccagagcaatcggcaggagaatggccttgtcggtcccggcaagaaattaactaagcaaaagtcaagcggccatctgaacggcaactcgggcaacggctctgctaccggtccgggcgcgtccgctcacttcgatctatcctccgtacggtctgctagcgatacggctttgatatctccgacggttgccggcaaaggaggagatagcacgaaggcagatggcaatgtgcgtgggatgttgaatggacatagcaagggtggagacatgacatctgcgcaagaaaacggcgatgtcgcccagaatggtggcatagcaggtcatgtctctcgcaatggaacctcgaaacgatccggatccaatgcttcgattaatccgctccagctcgcatcgactatcctcaaatcgtgcccgatgtacgacactatcgccatcttgatttttttgctccagcttccaccgatggtcttgaccctcgttcagttcttattcgcctccttgactttcatgcctcccagtggcgccgcggccggttctttgtcgtcgaacttcgatatttttcagggtccggctgggacgccatctctggggacaatgattgcgatggatgggttctgcatacttctctggggccttttcatgtggaactgggcgcagaactttgccatcgatctcgctcatgtccaagttgctatcaccttgggtggcgggggttccgggaagaacggcggggtcaatgctctctgtgtcggaattgttctgcttcttcatcttgttcgcagtaaaggcatccaggactttgtcttgggtcatcttgtctctgctaaactgctcagtcccgatcttctctcccaatattcgcatctgctacccgctgagttccgacactccgaagcacaaacgtctccgagctggctccgcagccttcttgcggtgcatatcctcgcacaagctggaaccgccatggcgcgacgttcgatggccaagaatcggtcaccgacaccgttacggaccggcaagcggggagatacggaggcttctgcgggatcacaaggacaggcagattctgctctggaatctgctgccagtgtttcgtcttgtttcgtgggacctgatggtcagttgaaagacggaaaggatcgtttcacgtcagctaagaaacgcagacggcaagccaatcaggttcggagccgacagccgttctgggctgcgcttgccagtacaaaagtcacggtgatgagggaatatgaacattcgcgggctatctccaagacagcccgcaatctcacaatgacggaggaagatctccagggggtgtctctcgacgacgggttaatatggattacggatgtggatagctcttcgattaaattcgccgcgggtgagtttaccgatgaccccgcggtgtcaggttcatttgaagccggtcgtttggaaggagacatggaaccattctacgtctgcgtcaacggtgcgctttgggctaccgcttcgatatgcagagtttcagacgccaagggaccgagcgttgtccaatggcggggcgagattgctggacttgctcccaattgcgcatacacatgtgcatttgtacgaagcgataccgacgaggaaatctgtgtcatgagtgtcaagacgccttcaacgactgacacagagcaaggtaagttcaggctaaaagacaacgtctcattttcaataagctcattgcttgaaatagtcatttccgcggtatcgacacccccacagccgacctaccgtccatcgtcccccacaacgacgctcaagaactctatcagcaatgcggaatcaaagttgaacgaaaagcgcaatcgtctgaaaaagacgaagaacgaccataaagctgttatctcgaaaatccggaaagagctcgataacttcaatgctcgcctccaaagcggaaatgacgagaatcgccaaaagcagcgttcgcttcaacttgaacgaaacatccggcagaccgaagaggctactgcggtactagaggtacaactcgacaccatggaaagcgttcctgaggaggagatggaagagtgggcggcgcacaaagcggacttcgaacgcgagctggaacgtttcaattcgaccaaggaagaggttgctgctgctcgaacggctgcagctcagcaggtggcggcactagagttggaattgacgcaggctgttcagaagcgagagcgtctccagggtcgccgcacccgggtgaacgagcagtatgagcgtatcatttcagccaacgcacaagggttgaatgagagagaacgtcgggccgctgaacaatttgccagggaacaggaccagtcaaagatggagagcaatttccacgagcatttcgggagcatcagccaatccgtgcaggatttccagctgcgcacgagtcaactctggcagcaggcatctgcaattgagcagtccatccagcaacaacaacagcaaatgctcctcgagtctggtcctctcacacccgaaggcaacttgccgggcaccaatcctctgcctgagaccagtggtccgtcgttcaacgcatctacgaccactgcacctagcgctcgatctctgatggggggtcttagctttcctcatgcgagatctagtccactacagatttcgtcttctccagtccacgagatgccgtcaaatccaactagcccatcgcaagaccttcccttcctcccacagtttccaaactctcctgtcggcaacgtgggctcatacttcgggtcagaaattaaccaccgagaccgttcgttctccaaccgctccactcgcagcagccaatatggctctgaattcttggacacgaaccacttgccacctctccagcttgacctagcagaattgcttggtgagaccaagactcggcctgggtctgatggtttcctgcatcaaggtggccgtacggtcctgagccctttccagcgagcagtaagccgaggtagtggcagtggcagtggtagtggcggtagtggcagtgggaccggcagtccgcactcggcacgagactagttctctcggcggttgctgttgtggtctcatgcctagccacgctgtcaacccgccatgcttgtcttctgagaagtggcctcaagttttgtgcgtccgtgcttttggttccgtccggttggattcccgccttccgttagtcaatctttctcggcctgcgctgtgatggctctggtttattgggccgttgtagtgtggcacgcatctcgcgatgagatgacaactatatggattcgatcgaagtgagatacatgacagctctgttcctaacgccgaaaaacaaaagtgttctatactcggttcttgtatactctctctcacaaaagcgtagacgcatcaatatcatgaaagcatttctcatcttcatctctccatgtctactgtaggatcatagtggataggtcgtcgatttggctttgatgccatgtctaatcaaaagtatatatccagcccaaacgccgttttcccaagtatatacaatggtttgccaatagcataagcgataccgtattcttcatctatatgaaaccagacatggctcaaagttcaccccccatcttccaaaacttggtatttgcatacgttaaacaaagccgctcaggtaaatcattcaaggccttatcgtcttgtcccagtgccaaaacagacccagagccctcaaccgcccgaacaacagtacccagcacgatggagtgatcattcacatcaatcttctgcggatgtagggtacattcaaaaacaaaaggaaactcgaccgcgtcatccacagcgattgcttccgccctccgcttaagaataggaagcgatcttgacggatatccctgctcgtccttagtaggcaaagccgcgaactcaaactccccatgtcctctcagcatagaagcgagtgcgatattccccttagagaaatccctggccagagtagcagtcgcgggactcggtgcaagtaaatgaaccaggaaccggcgcgaggcaagcaacgcattcaatgtctccgatgggcggcgcacgttgaaagagatcacagggtccggggtgagagtgacggtgctgaaggaagagacggtcataccgcggaaggaggttatattttctgaaccggagggatcggttgctgttatgattgcgacggggtatgggactcgccgcatgaggaggcggacttggtcggatatagatgtcgagggtgttggcggttgtggtgtgttgtctgcgtgggatggggcattgggcttccctgttcgaccattttcttttgaaggcgctgtggaattgctggtatatcgtcgttgatcggatcgtgatcggtgtttggtgtatggtacaggcggagaggttcggagggagagagatgttcccaggaacaagggtgtatagttgttaatgcatgatagttctggcattttctattagtacaggacagaagcattggacatacatcgtgacaacctacctccgagtgctgtccgagcagtcccatgcgcgggaaagacgagcttcatcccgtcggcctggaattgatggagctttgagaggcgctcaggggatcacgcagggcacaaagtcacagataataagactctgccaattcatgtctaaattgacagcaaaaaaagagagactcaaagagacatagggcaatatgaagtcatgcaaacatctaagttatgaaattcccgaaaagaacaggcccgcttacgtaacccgcgataatttctttgctatggcatcaacttcgcaacctccgcaacctccccgatagcattgcggccccgtcaacctccgccgacctcgacaatactccttgttatttgcatcggcatttccgaaacaacttatacaacatgtcaatgcacacctctctccgccgcacagcggtcacaatcaccaactcaacaaccaccatcctccctacaagactacccacgagcggcacaaccttcatctgctcgcaatgccgacacgccactctcctccgccgccccaagcgcccctacacctttacacagctcatcacgctttcggacggcagcaccttcacgcaccgcacgacctcgccggccccgatctaccgctccacgcgcgacacacgcaactccatcctctggaacccgtccagcagcaagctgatgaacgtcgaggaagacgaggctggtcgtctggcggctttccgtgcccgattcggccgcagctatgatgccagcgcggcgcctgctgcggcagcggaagaggaggtggctaaggactctcttgcggctaaggaccctgctcttgcgaagcgggccgaggccgaggcgaaggctgctgctaaggcggagcaggaggaggaggataacttgcttgatttgattagtgctttcgggcagaatgaggcgccgcctccgcctgagaagaaggttcctaagttcactaagaaatagtgggctttggatgtcccgggttgaatcaggttgttctgttttggactgcttggatgggagttgggatcttcttttgcttttttatgttttcttttcttttcctgtgtttttgatcttgtacaatatacatatgtctggtatgagcctgctgtattataccaagaattcatcttttctctcatccatgctatatttttgtcaagtctatactattaccatgggtcttgggagcacctgcccaggtggtccttatatactgtgactattcatacacagccgattatctctaacacagactaacacctgagtcttgttaacaaatgatacaatataaagtaaacacgcattagcattcatcaccccacctcagcagtatctcgcaaggtactcagctcgtgggcatgtggctgcttgatggagtggtctatggtaggtatcggtctagggccagaggaagatgtatgaattaggacagtataactgactagggtagataatgattttatttgccacaatacgcgaacagtggtattcgaagtgcagtggaaatagaagaaaaacacaaagatccccagcttgctgaggaccatcatcagttgcagcatggcataaacaaacatcgcgaaagggttgtcccataataaatacaaaagacgagatagaacggtgctaattccggggttgggaaacagcacccgagactgaggcatatcaagcgtcatcctcagcggccagtagccccgattcatctgtgggctctgccggagcgggtgcatcgctcacctcggggggtacataatacggaagtccttcctcgccagcatctagacgcagaaggaatgtctcccagagttcgatcaactgtatttagggttagctggatgaaaaaaaccaccaagacttggcgagaacttacctctttctgagcctcgactgcactttcaaggaatgtttccacgccagacttgaagtcctccactttctccttctcaaaccgttgtagttcgttccgcataagacgacccatatcttcgaagagcagccgcgtttggtgcactttgcgctctgcatctgcaacgtcggcgttgacttggtttaagcggtcttgctgagtctttccctggcggagtagcttgtcttggttattcttgcgcttctgtaggtcggactctgctgcgtgccaggtgtggaaagccttttgccgctgcgtgaaagccaacttgacacttccaattaaacggatatattcatcgatcgtgattccaagcgtcagaacatcctgctgcgcctgtcggtcataaagttcccgaatgcgcaactgaagttcggacaggccttccaatgggtaggaaagggcgggagacagctcgacggcggataaggcatgcaacgagctcgaaaagtcgcttgcggcctcggatagtccctttcgttgtataaccacagtatccattgatttcaatagagccttcagctggttctccaatgcatccaggtaaacttttcggtcgtggaaccactatttataggtgagcaggcgagaccgatgtatcagaaacgattcacttacatcgtcatgttccacgaatttagttcctccaccaacagaaataccaaaggagctcagcattcccttgcttgggccaatatcaggctctctgttttccttattcttaacatcaacggtgaaagcttcactttctaggaaaattttcaaatcgccgtcatgttgaagaataggatggccggcaatcttgttgagcattcgttccaaggcagctctcctcgactctacaaagttggtatcaaaccggccaactgcttgcttctcgggcggaggcgcaacgaccactcccgggttattgctgtgcagggagttgtagagccagaggaaatcacggtatcgacggctaacggtgaactcgggttggcgataggccttagaagttgtctagccataaagtactgtcagcctttccttttccactgtaaattttagtgtgtctaattacctttgtcgaaacttgatacacaatatgactgcttgtcagatctcccactttgtgcggatctccgacatagatatggaaagtcggcttcgcagcctgctccacgctcatgctaggctgcgtctgtcttttcggtccatccgcttgcaccggtggttgcacgggagggggtcctcggaagaccgcgctctcctcttccaaattggccgagtctgctgcctccactccagatgcctgggagggagatgaaagtggtcgtgcaccccgtccggcgaaaggctctttctggggcggtgctggtgcctcatctgtgggtgttggggtgtcctcgacgggcgcttctcccaatggaccgagagggtcgacggaatcatcgatggattctagtttagtggcttgtgcgttgatcttgcgcgtccctcgggggcctcgtcttcctggtgtttggacagcgggcgagctgtctgacgcgggggttgcagctgctgtgtggtagagtgcgcttagtgaaagttcgtggaaagagcggacaagccagataaaacataccaccttcttcggcgccgggcttggggccgtcgctgtgcttgaaccgcgaaggctcatctgcatcataaatcagagtgcgattcaaagagctgtggtatgatgattgcctaccgccccacggggaatctccagaatcgagatccattgctaccggtatgagatcaaagcgaagagaatgggacaacggcgagaagacgaatcaacaaattaagattaatgtcagttcaatcggagcttagagggtgcatggagttggagagggagctggttggagtggaggccgatccgcatccttagtcactcacgggatccgggcaaccttggaagacctggagtccaccccatgtggtgtttcgtcttcaactctttgccattggcactactctttgatctgggggctatttatttatgctcatgacgaatacaacccactggatgccagtacccgatactctctacacattttaatgtcccatgtctcaacacgtcacatcatttcaattggagcttcttaatgtcgggatgatctatccacgattcccccgctcaaatcaccatcggcatttaaaaggtcattagcaaccgcgcaatatctatttgacccacgggaggcccagcttgtgcatttccacagccagctggaagatgtaatccagactctcacactgagtcttcgccttggcagtgttatcaccccagacgtaactgcaggaggaaccaggataagtatacatcagtatcacatggagggaggttgctatcactcacattccgtgcctccggacaagaaccgcgtatgtgtccgggtacttgttcatggctgcctccaaaccactggtgaggtcctcttcgaaggcggtgttttcaataatgggaatcttcaaagtatcgaagaacccgagcatgccctttcctttaccgcggggaatacccttgatctgctcaatgttgctgatctcgaaacaagcatccgggcccttctcccgctccaccaacagagtgatcagaaccgcccattgcgaatgagtgtggatgcagcacccagcaccatgctcaaaggcagtcaggaatagtggggtacaggcggagggattaagcttgaggggtttgcggatgtagttgcggtccgaggcagggtacttgggggtcggccattggagcacgaagatgttgtgaggttgtatcaattccttctgaactccggacggagcgatgaagatgtgttcgccttggcggatcgatgtctacttttccatcagcggggcaccgttgaaattttttttgccttgcaagtataagcttacaccacctccggtgccggtaacccatccccagttgtagaatttgcgacagagctcggggataaggttggcggggtgttcggggtcatcagactggaccaagtggtcattgttcggcgcaacggtttgctctgaggtgcacatgatgggctgcgacatattagcattggttcaggtagatattcataaaggtggaagaggacctaagtttgcaagtaaccaaatttgttattgttctggtgagccacgaggtttccaaggtttgcgacgagagtgctgagtaaccaatacgtttggcctcgggagcgggggactacatattcagcacgccattttaaggaacagctcttctagaattgtacttgcagcttaatgttgatatcaaaacacttgcgatatttaaatgtaggaagcttaattgcatctccaatcaggtccttctcaattgctatcagtcggtgtttggtgttctctactaaaatgacaagtgtagtttaactattcatagtttggcgctagtcaaaatttgctaaacatgcttagtaatgtcgctgcacaattgcacataactaactaactagcaagacacgccaggtctgctgtcaccagaagacgtgctctaattcattttagcgtcggaatagacagactagcgtctagagtgctctgcttcctgttagggccacctttaggaattctttaagaatcctatagattccgcgacctatgaacggcttacaccatcaaggatcaataactgcgggtatttatacacctcctcacttattagcgttgggagggaaaaataggattgaatcaaataaaaatccaataaaaatcaataaatacatgactcgctattagcttgatgaacagcacataaaaccaataataacacatatactctccgagcaactatttgtgtccaatcactgtagaacaagatcgaaacccgtgtgtacacgccctagtcccgattggggagcttagggaagaggccacctggaccttccccccagtgttgccctttctataaaaccacatctcctcttttcttcacttggtgctgtgtgctccactttcattccttctacttgttgttcacaatatgcgctttaacactgcgttgacatctgctctggtctcctccgccagcctcatgggctacgcccatgcnnnnnnnnnnnnnnnnnnnnnnnnnnnnnnnnnnnnnnnnnnnnnnnnnnnnnnnnnnnnnnnnnnnnnnnnnnnnnnnnnnnnnnnnnnnnnnnnnnnnnnnnnnnnnnnnnnnnnnnnnnnnnnnnnnnnnnnnnnnnnnnnnnnnnnnnnnnnnnnnnnnnnnnnnnnnnnnnnnnnnnnnnnnnnnnnnnnnnnnnnnnnnnnnnnnnnnnnnnnnnnnnnnnnnnnnnnnnnnnnnnnnnnnnnnnnnnnnnnnnnnnnnnnnnnnnnnnnnnnnnnnnnnnnnnnnnnnnnnnnnnnnnnnnnnnnnnnnnnnnnnnnnnnnnnnnnnnnnnnnnnnnnnnnnnnccagggggaggaggagactgcggataccaccgtcattgaaaagcctaccttcactgtatgtatctgaaacgctccctcttcgctcactttgctaactcccgcaagcctactagccttaaagctcctttcctggagcaattcacagacgactgggagtctcggtggaagccttctcacgcaaagaaggatgacaagtctgaggatgagtgggcttacgttggtgaatgggcagttgaggagccctccgtcttcaagggtatcgagggagacaagggtctggtcgtgaagaacgctgctgcccaccatgccatctccgccaagttcccgaagaagattgacaacaagggcaagaccctggtggttcagtacgaggtcaagccgcaaagtgagttatgcctttctacatttgttcgagatcttatatgctgactggaattgtcctgtgttagactccctggtttgcggcggtgcctaccttaagcttctccaagagaacaagaagctccaccaggaggagttctccaacgccactccctatgtcatcatgttcggacctgacaagtgcggtgccactaataaggttcacttcatcttccgccacaagaaccccaagaccggcgagtacgaagagaagcacctcaagactcctcccgtggcccgcaccaacaaggtcacctccctctacaccctgatcgtcaaccccgatcagacctttgagatcctgatcaatggcgactctgccaagaagggtagcctcctcgaggacttcaaccctcccgtcaaccctgagaaggagattgatgatcccaaggactctaagcccgccgactgggtcgatgagattaagatcgccgaccccgaagccaccaagcccgccgactgggatgaagatgctcctttcgagatcctcgatgaggaggccacccagcccgccgactggctggaggatgagcccgagagtatccccgaccccgaggctgagaagcccgaggattgggatgacgaggaggatggagactggctcgctcccactgtccctaaccccaagtgtgccgaagtctctggctgtggcccttggacccgccctctgatcaagaaccccgagtacaagggcaagtgggaggcccctctcatcgacaaccctgcctacaagggtgtctgggccccccgtaagatcaagaaccccgcctactttgaggataagactccatccaaccttgagcccatgggcgctattggcttcgaaatctggaccatgcagaatgatattctgttcgacaacctctacattggtcactccattgaggatgctgagaagctccgccaggagaccttcgatgtcaagttccccatcgaggaggctgaggaggaggcttctaagcccaagcccgaggtcaagcaagaggataccactgtcaccttccaggaggatcctgttgcctttgtccgccagaaggtcaaccacttcgttgatctggccaaggaggaccccatcaacgctgtcaagaccctccctgaggtggctggtggcctgggtgcgctcctcttgactatgatcctcatcattgtgggtgccattggtgctagcagccctgccgccccgaccgagaagaagggcaatcagcccgccggtgctcccaaggagaagaaggaagaggctgtcacctcctccgctgagactagcaagggcggtgccaccaagcgcaccacccgatcctcggccgagtaagtgcgatgattgaaaacaattatacgcagaaaagaattttacccacccagcgaagagatttgcatttagttaccgcagtgatccctttcttgttgtgtcttggccgatgtttttggggtgaaggtccatgaaacattgaatggaggcccgatttgtatactcctgattatctctattatttctactcggtattcactttatttctttcttggaaccgccttgccttttcacagtgtcatgactatgacttagccctctccgatataggagacgtaaagtaaagcttgaaatgggaaatgccttcctaaatcgctatgatcccttgcctacaacgtctagtacgcacccgaaaaagaatagatgcaatcgataactgccccccagttagtgtcggcgatataagagccaatttgcaactcctcattggctgaaaccgccgaaaagctaccttatctgggggttcacattacaacgtggggaatacccgtggaccgcccttgtgactaaggcggtttccctcgggcctgggggtcggggtagccatagatatatcattcccgaggtcctggcacccccagatcgtcttcatatttctctttctacttaatctgtgacttgtccttttctctaattctactgcttttacctctctataattcatcatggctgcttgtcggtcaattgcccgttccatccccaccgtccgcgcagttccccgcacggtgtcggtaactgccagagctgcttcttccagatctctcactacttcttccctcgccagtctggtctcccgcagagtagccgtcccctcttcatcactctctgccactcgccgcttgcacgcaacagcgcagcgactcgtccaagcaacaacctcggccgtctccactgctactgaatacccaacaagccacgaaaagattgccaacccaattgacactgctaacttcattgacaatgagtttgtgtcatctaaggcatctaaatggattgatcttcatgatcctgccaccaacaatctggtcacccgtgtcccccagagcacagatgcggagctaaaggccgctgtggagtcggccgagaaggccttccccgcttggagggctaccagcatcatggccagacagcagattatcttcaagtttaccaacctcatccgtacccactgggaccgattggctgcgtccattactctcgaacagggtaagacttttgccgacgccaggggtgatgttctccgtggccttcaggttgccgagaccgcctgtggtatcaccacccagatgaccggtgaagtcttggaggtggccaaggatatggagacaagaagctaccgcgagccactcggtgtcgtggccgctatctgccccttcagtaagttgcccaccactttcaatccctccacatggatgctaattgttaccaagacttccctgccatgattcccctttggtgtattccggtcgctaccgtgactggtaactgcttggtcatgaagccatccgagcgggaccctggtgccgcgatgatcctggcagagcttgccaaggaggccggtttcccaccgggtgtcattaacatcatccacggtgccgcccccactgtggacttcatccttgatgagcctgctatcaaggctatcagctttgttggcagcaaccgtgctggcgaatatatctacgctcgtggttctgctaatggcaagcgcgtgcaagccaatctgggtgctaagaaccatgccgccgtcctacctgacgccaacaagaaccaggctcttaacgccattgtcggtgctgcatttggtgctgctggccagcgctgtatggcactgagcacctgtgttatggttgctgagactaaggaatggctgcctgagattgccgagcgggccaaggccctgatcgtggacggtggcttcgaggagggtgctgacctcggccctgtgatcagccccgagagcaagaagcgtattgaggacttgattgctagcgccgaggaagagggtgcaaccattcttctggatggccgtgggttcaagcccaagaactaccccaacggtaactttgtaagtcttactacagatactcatatatgtatctcaaactaattgtgcctccgcaggttggcccaaccattattaccaatgtcacccccgatatgaagtgctacaaggaggagatcttcggtcctgttctcgtgtgcctcaacgccgagacccttgacgacgccattgacgtgatcaacgccaacgaatacggcaacggtgccgccatcttcacccgctccggctcgaccgcctccaagttccagaaggagtgcgaggctggccagctcggtatcaacgtgccaattcccgtccctcttcccatgttctctttcaccggtaacaagaagagtattgccggtggcggtgccaacactttctacggcaagcccggcttgcagttctacactcagcagaagactgtgaccagcctttggaagagcgaggatgcgatcagcaccaaggctaacgtggttatgcccactcactcataaatatggtatatgcctcttgctttcttgcttttcctttagccggtcattcgcatgaaaaaaatttgtcttttcttgttaggcaaaacatacgccttatggatcccaatgaatgtatctgaattatatgcttttatgtcacgaaattcatgagtatgcacatggattgcagattgaacagtgtatgcagaattacaatcgcatactcgcttatgcggccttgcaaagtcattttggtagtcttttcagatgtgtttttttagatatacgtattctccacttctttagttttctaggcagacagcagaaaaggggaaaagcttagttttgcgcaaacgacttttccatgaagaaacgatctataaggttatagcatgtctatgatcaaactcacacttccctagtacgtactaccattaaactcattggccaggttgaaagctatattgacctatggtctatagaaaactaagaaactgaaagccctagaaaatacaaggctatactcaacacacgagcaagagcaagaacaagaccatcttactcggcaaccttacgctccttgaaagcgtaaacaagtctagcagaagcaaccttcccatccttaacgacaacaacacgacgagtatggcgtctctcgccatcaacaatctcaaatccccaaacctgctcagcagtccacccagactcgacattctgcacaaagctctgcaaaaacacgccctcgccctcctcggccaagaatccctcactcttcgacccatcaatgagagtctcgccaatcaggaacttcagcaccttagcgtcagcctcaggcgagccggccttagtctggacctcgaggacagggcgcacagcaccatcctcgctcttagtgccggcgatctggcgcgagcggcccttcagcttgccgaagatgtggtcgacgtgctcgcgctcttcccagtccagtcggcgctcttccttggtgccttggatgccgcctgtgattacttgctgcgcgtcgacgtggatgagcgcggggttctcgctgtctgcgtactgggtgatgtagattgtcactgtcgcgtatgagagagtcttgcgaatgagccagcccactccttgctgtttggattgttagtggggttgagttgttggatggggtttatgtatggtatggtatatgtagggcaggggataataatgattgtggttatgctgtgatttggattatgtattgtatgattggagtatcgtgacagggaatattgtgacaggggttgtgaaactcttggctgttatattcgagtaacccggaaggccggaaggttagggcttggagtgcataccagagataggatagggtctgtcgggttagaatgggttgagtcctgtgatacatgagtatgttgttatatggcttgttttatttaagcataccatctcccattttccattcaggttctgcatagtaatatcagcaggggcggccatcttgaaggttgatgtatagtatccggttgatgcgggtatggcggggggaagtggtaagcaatgaaaggacaatttggtcagtagaagaaaaattcgaacttcaaggggtaaaaagaagaaaatagaggaacttccaatgtcacctaatatatagttgtcttggttaagcaatggtcttcaagcatgtgtttattctcgaatccgaggctagaagtcacatgatctgatgactgtacatgtgattaaggagagctcggtgtttacatacttcgagagctacaatccaatcatgtcgttcaataagaaatatgccggtcttcctgatctagtgagaattcttggctgatatccacggggcttctactgactgtgaccaaggacccatccccagatatctatgaaacccccgacttgaccgatgaagcatccaccttgcccgtgagttcgccaattccacaccaaagagacgtcggcgggcccagtcactgatcctatctagactactactatccgcacagactccgaccatgatgacgcaggctcaaactccgatatcgaccgcgagggtgtcaaccccgaccaggcgcgtttgcacttcatgggcgcggccgtggacgcccgcgacgtcaatttctcagatagcatctccatgaaacggcaggcctaccggagcaagagcatcagccgccgccgtcgacgcagacgcgaggacggggtggaggaggttggtgacctgagtgatagcgaggacgagtcgcttgaccggaggcttgcgcggctacggagagaggtcgaagatctcaaggtggaaatgaccaacaaaaccgacagcccagatgctgaagctgaaaacccaggagagaacctaggtgatggcgttgcggagctaagccgcgctctggataatctgcacgcctcgcgaggtgcagcgagctcatcgcactcggctgcggctttgctgtctcagaagcttaggcctgagactcgccctgctacagacgtaaggagacaatcctcgggggatacaccaagggcagtgcaggcgccaactgcctcttcggcagggatcctctctcacgcagcagcatttgacagccgcctagcgcttcttgaaagctccctcggtgtctccagtacttccaatccattcatcgccgacggcatcaacgactcaacgtcgcgatcagtcctcccagctctggaccaactcacctcccgcctgtcagcactcaccggacttctcgtcggcacaagcccagcagccacgacaccaggagtgcccaatgccgcgccaggaatgacaaccccacacctggaagctctctccacgcgagtgcgaaagctgaccaccgatgccgaggcgctcaccgcagcccgcagaaaagccttcgaggccgcaaaggccgtccacaacgcccgtctagcaacttccgacgccgacgtcgttcccgcactagaagcatcgaccgacgacgaccatgccgccaagatccaagccctctacaccaccctcccaaccatccagtccctgcaccccctgctcccgagtgtcctcgagcgtctgcgctctctgcgcgcctgccacgccggcgcagcccatgccgcggactcgctcaacgagctggaaaagcgccatgccgagatggcctcggagatcgagcagtggcgtgaaggtctgacgaccgtcgaagagaagatgcagcagggcgaagctgctctccgctccaacgtggaaactgtcgagccatgggtgcgcgacttggagtctcgtctggcacgtctggaaggtcccgcggcagtctaatccatttcttgtctactttttttgatctgctctgcctggggcagaggtttgatgaataatacccagtttgcatgtacgtcgaatgttgagggcatattgtagttatcttcaattgtcaatatcggttctataccagatggccttcttttttatatgaaagactactatagtgttactgtagacagactagactgtataccaccatactaaacattagatccctccctcacccgcctcaacacctgaaccctcggtctcatcttaacctcaacccaccacccacgcaacaaagcactcctcatatactcgcgcagaccctcaaacaaaccaacagcacgcacaccagcaacagcaccgataacacggcgctcagcagttcccgtagcaggagtcccaggcttcaagatcgagacccccgcaaacgaatctaccacaagcaccctctcccagtccgaagcagggagcgcacgccggagactgctctcatcagcatccatgaacccggcctgatcacccgcctcgacaacaacataatcgaacggctcccagaacccactagtggctttcacagtcttgtcttcggttttgtcgtatacccaccccgacgaagggtgttgttgcacgaagcgcgttacgcccgtttggcaggcgaggttacctaagtagacattgatcggcgcgctgctcttctcagaacgcaagcccgtatcgtggaggacagagtgttgataatgcatggcgtcgagagcctgcccaccggggtaatttgccgcagacgcaggaaggagcacgagatttgacagacagaaggtggcgagtgtcgtaatggccagggcgcgtgtcgccagtcgggcgaaaacagagcgcgagcggtgcgtccagagatatgcggcgccgagggctgctactgccgtcagggaggggatgatgtagacgatgaagcgccattccttgtgtggctggaagctgtacagggcgacgaaggaaagcgccgggatgagaagtgccagggcgggggagcgcgtggcgggttggcgtagtgcgacggggatggcgaggaggtaggagaggggattggagaggaggcgggggagggaatttaggaagtagaaggaccatggctcggtaccccattcggaggactggcctgctaggacgttgaagcggaaggcttcgaactccggccagagggggaagcgttgccagaaggtgctgtcgagatagatggtgagggcgagcccggtggtgaggcctactaggcccgcgatgatggtgtgttggaggttgatccgtcttgttgctagcaggaagagagtctgggttccgactaggagggctaactcggagcggaagactacgcctgccgtggtgaggagcgcgagtgctaagccgcatttcttttggtctgatgttggacgagggcctgggagaagcagaaacattgctagtgttgtgatgctgaaggcgaacatgtttgataatggccttgaggcatagaatatcaagtggaactggcttgcttggagtaggatataccagatggctgttagctggccgaagctatggcgcaggcctcttgcatatattgctagggaggaggcattgagtaggcccaggatagctcgagctggatgtcggtgttagtttgcttgatgtatcgcactattatctatgccgtacctaatatctgtcggttgatcccctcattcaacaagatcacaggcttcgaaagcatcgcgagcgccatagcgccaagagcgctccggggaacagccccggggaaagagaaatggtcatagtcggtgcgattgagattcaggtcattaaagccatttggcaacccgttggccaaaatatcatgtacggcctggacgtggaacgactcctcgactttggtgtatggagcgacgaggagatgaaggaggatcaaggctgggaagagaagagcgagaatcgcatatgctataagaaccgttagcttgttagcttgtgttgttgtacagagcgaacgaactatatcccatggtgactgcatccgaggagtgtaaatccggagatctggcgcctcccgcacttcacctttaacatcttccccaacccgcaaagatgtttttcttcttcggccttgggaagctgttttacggtatgtacttgttattccaactctccagcttatgctaataacccgccctccagtcatcgtcctcatcatcaatgccatcgccgtcctctccgaggaccgcttcctagctcgcggtacgtccctcccagctacagcccgtctagaagaataaaacctaatgaataccggaaacatacagtcggaatgggtcgcacacaacccgagccaggcttcggcgcaacatacgatagcacaagcgtgaaagccaagtccgtcgacctgatcgccagtgtgcggaccgtaatgcgcagtacgtttcccaaccccgcgaccatacaaccccggtcctttatctcgaatctgagtgacagctttcaacctgaataagtcgcaagctgttctactcgataaccgagacgccagccacggcccgatgggatagatacatagctaacacatccgcgcatccagtaccccttatcgtcatcaacacagtcatcattgtctacgagctggtccttggttaaatttcgctttttcgctatttcctccacgcgccgaatgtcgaactcccgcatccgtcgcaacccagctgcatagtgacccagctgccctgccaaatctacatcactgttcactacgacttgacttgcgctgtgacctcccctccgatgagctattcggaatccgacactatatcattaatgacaaagagtgaaatggggcatgatccatgcacgagcgaggagcataccgagggcagaggggtggtactgaaaaaccgctgccaggcgtctacttcatgctgcgctgggttaaggcgttgtttgagatgacaggaacggtggtggcgtgcagcgaatagcccgtcttcccctcgagttcgttttgattacttctggcttgtaactatatacccaaaatgctagaattgcaatggacactgatcgcgacatggtttacgtgaatatgtgtaggggattgtaatagggaaccccttggctaacggggcccccctctgcctggttctgccttattttgccttacacagaaggcatcaattcaattctgccagagtcaagtgactacacgtcggttgggccatttctttacagaacagcaatattacgcgtatatcagcgaaaaatttatacaaatcacggccctcttaaattgagactttgtgggagatattcaacccgcaatgacagactcatatttcttattctgatcacctcatctgtgagcgaatcaacgttgagtcaccgaaaagcgcctacaatttcatccctagaaatcatggactttttcttctactgttgtgatggtaaaactcattacttagtcatctgtgtctgcatagttaactaactagttaactaactaaataattaactaaagaagcaaataattcatttcatccggttcagcgcagctcctcccgcctagagcgcagatcctcttgcgtggacatttgaatgacgcgctatcttgtgcgcagtttgtcttcgcatagggagttggatagaggagtgtgaaggaggagaaggaggaggaggaggaggaggaggaggaggaggagaaagtggcagagtcggcgtgagctccagatgttccgttggatcagattatattgtttactagatcattgaatttctctcctctctaaatagttatatatgcacaaatttgtcatactggatccatgtgattgaacagacagttcacgactattcgaaagaatgaatacaatactgcatcctcgtttaggcatcctccaagttcaagttgcttattgctaatagttaggtgtctttcaaagtgaattgagttccatacggagtcgggaacggtattctaccaacgccgtgtgacggacttggcttagggctaagcttagcgttcggactatctaatccaccccatgtctaacacctaactcatattgacaaaagaaaaaaaggagaaaccaaagcaagcttcatctagatcaaatacccccgcaaaggcgctgtcaccttgtaatcatcttccagaccaaccactagactaatcactccgtctggcctcaccaaagccagtgcacccacgcggggatccacgcctaataaagcatgccctgaagcatgaggttcttcgtagattcggtacttccactgcggcagcggtgctggcaaggcgtctagattgacctcgtagcggctgttggtatgcaccagaaacaggtccacgatgcaattccggttctgcgggttagtgtagaagatatcctcgaagcctcaggtctgactggacgcaccaaaacacgagagggccgacttgggcgacgccaggtagtctgtcagtgggcccaaacgaccctcttggatcgccgatccaacaaatgcaaacaagtgaaagcgtccattggaggggggttcgttgagcaagttggccgctattccgtcaagatggcgatagagatccaccggatacagtcgcttgccgggggttaatggctcgactgcttggcagtcgaccacgaagggtgcttcgcagggccgtgtcaaaggtcctggctggtactggtgaccaactccagaggtgaagccctgtgccttcttgtatgtatcctggaattgcgtatcctcacggaaatccttgcgcgagaacagatgcgagaactgaacatcaaagtcaatcagctcctttgccatctgccgtcgctccagagcataagtctccatcaggtttgcgtgggccctcccctgcagcaccaatgccagcttccatgttaggttgaaagcatcggccacgctagtgttcagcccctgagcagccgaggtgctgtgtgtatggcacgcatctcccataatgaacacgcgctttccgtcccagaactagtccacgatgcgctgttgcaggcagtattggctgatttagaggatctgatcgatctccatagtagctgccggcaatatcacgcactttctgccgtagcagatcttccagagccacatcgctgtatctggtgtgaccattcatggggtgagccttggggccctcctcggccatctggcggagatcgtcctcattaagcagggtgtacaccccgtttgtatccaacgaattggggatcaacatcatgcgccccttggcggatccggcagatggtagcgtcgcggcactgcctggtcagacagccgcaaaacccaattatctgaatcaacggttcctatcgccggcgtagttctggaaagttgctgtccaattgcatatcagccacacaccagacctcgccctggcttccatgcttctcccattcaatacctagcagctaacgggtcttgctgccagccccgtcggcacccaagagatatttggtgcgaatagtagagaggacattcgaatatccgtgcttgacaagaacatgcagaggatactaggggtcatcttcgacgtaagtgaaattgatcagctccacaggtcgatccacttgataaccatgcgcctgtagctcttcatcaaaggcccgctctgtctctcgctgtggcacgctcaggatccatgggaagggagtcgtggtttgaacctcctggccaacataggtgcaatcgagctgaccgagatcgttgttggcccaaaaagccatcccactgacgtgtttacccaggatgtccaggtggtgatggatgtttagagtctgcaggacttcctgggtgcgaggttggatacctggctcgcgtatgtcaatgccggcttttcttgtttttcacgacaaaaataagtaaactcacctcccgcatgcccagtctggatgcgccgagaatgcacgtcaatcactcgaacatcgatgttgtagcgagccagcgtcagtgcagccatgaaggcgacagggccagaacatcgcatttgctatcggagaccataatgtggggttggtgatggcgaaacttggaagacaataagttgcgagggcccatcgatttgataaatataaagattggcaaggcttcctatattatcacaaccctcccaacggacattcggaactggacgttttcgggcggattgtccccgcggatgtccgacatctggaccttctgatgccgtatttttcgccccttgtccggtgactgtctatatttcagagattttgcgagtcgagcccttgataaatggacgcacggggcagccagagctccattgggaatcatcctcccctattcgcttgccagggcggtgttgttgaacattgagttgctttctctacgatccgatactggggacggactaagtagcaggcatggatttcgacatgtggatggattccaatttaaatactcgtggatctatatttgtaagtgtctgtagctaccaaacaacatttgaaagaacatttgaaggccacatgcatataatctccaagcactaggagaattcaaatactgcgaactaagtgtaaagtgcatcgtgtctaccttctctacacactggatctaccagtcagcttgatcacttggcctaatacattggggagaagttagcaaagtcatccatgggcggggagattgaaatcatggcgaacataccattaatccattccccctcttccgaggcctaaaaacacacaacccgagcaacatcgagtggttgagctctgcgtcccagcgggtacaggctggcgatacccttatcaatctgctccataggcataccaggataaccattgggggcgtagtaccacgagttctcgagatacatgtcggtcagaatacctccaagggccaccgcgttgacggtcatcttcttaggaccacagtcagcaagcgaagctgcgagtaaaaccttcgacggcggccttggagccagcataaagagcgtgattcttaacacctgtcatgttggccgctacggacgagatcaggatcagacggcccccctcagagccgtacttcagagcatgctgggcgatgaagaactgggcgcgtgtgttcagcgcaaaggccttgtcatacaggtcctctgtcacatcctcctccgcggagaaggcttccatccccgagttggacatgacgatatcgatcttgctaaagtgctccaatgtttttttcaaacaactgcgtcacctccgacggcttggtcacatctgcttggatggcgatagcgcgtgggctgccgggcaaagcctgaatggcttcgataacgccctgtgctggcccagcggcgtgagcatagttgaccacgacataatgcaccgtgtgaggcgagctctttggcgatggacgcgccaaggcctcgaccggcaccggtgatcagggcgactttgccgtggagatcgaaggatgcgggcatggttggtactgtcaatatgtgtttctagagatgaaagcaattttgtgggatcaatgttttgctcgacctccagatttccatacatataaacaattactactcaatatcgagcccatcttccctccgattagtgtctatatccccaccgaggaatccgcccctaaatgcgccatcttccttgtcggaaaacgagccaatcatatgacactacccgatctcgacgaagctgtcctactttccgatgtctatcttttctagctatcgaatgtgacgatctgggaaggatcgcacttgccaaaccggcaggaacgacctacaccctcgtaccctcgctccttccagaatcagcaacaggattaagcgaggaaattgcgacttttgcattgaatgcaaacacaaggtataaaaggggaggaacaagtgcacagtagtttttctcttttcccttcttcccttgtacttagaatttggtttgcattgcactctttcttctggatcgaattggcacgtaacatcgaagcctttattcgacgagactagggtactcggagaatgacttctcaagaagtaattcgcgagttggatctaccttatagcgaggtaacctttcgaacgtttttaaaggttcatggccttcgtcgttacgttgctaagcgaaaaagtttttaagtgaacggaaccgacggcgtcgcctttaatttaatctcgaccactgagattagaccttcgaagattggataaggtcttttagactaactaatgaaacctaggtttcttctagttgtcataagagaacatatattacccacgagcggtttgagaacgaatgtatacacaaagacaggcttaaacaagttgcctggatgttctggggatcgattttctgggagaagaattgggggacaataaacgcagactggtatcaagggcatatatgccctttaatcaggcgtttggttcgtggccggggtgagagctatgttatacaagacggagcgccgtctcataaagcccgagcaacaaaagcattacttcggttaatgggtgctgttttgctagattggccggcgtactcacctgatcgaaaccccattgaatctctatgggatctaatgaaggattgattccagcgtaactatccacgttacgagcggaatctggatactatacggcgtatagtccaacaagcgtgggatgctattccaaatgagagggtgagtgagggtcattgagactattcctcagcgtatgcaggacgttattgatgctgagggggggacactgagtggtagagagagagagagagagagtcctggaattagaaaattagaaaagaagaaaaagtactgtactcggttgttaaaaaacaagaaaattactagcgtaaaagcagttgttgacgatgaagatgtgataaaaatgacttaattttgttagtggtttccgtacaaactatattgtaggtatctatgttgtaatctaccattatcctggcctggtcacgtggtagctagctactctatagtgacttgcacctcttacacattcagctataccttttcaacaaaacaaaatattctcatgaccatggactcacagaaagatactacatccataggcagtgacagctctagggaaaaccacccaccgacaaaatcagcccagcaatcaccaacagataccgatgatgtggaccgagacaccgaaatctcattagaaaaaatcaaaagtgcagaccaggcactgagtgttatcgaagatagcggatttttcaaacagtcgctttattcgtttcttgtcttgacttccgtgactgaggaggtcggacacaacctacttcaacttctggatcaaaaacacccacacgtccgaaaaggcttcttccttcgcaaaaaagtacttaccctcaaaataccgagttttacccatgaggctccactcgcctggttcttcgatcagcttttacagtggaatttcaacggtcagcttacacaagttgaggtgcggcgcgtgagggtgatggcaagcccgcgagtaacggcgcaatttcctggctacgtcggcgatgagaaagagcctgatacatatatcactcccaggggcaaccccgcaactggtcatccaaccgtggtcatggaggttggcttcagccaaacctactcaagcctagtgcaggctgcgaaagtctggctagagggtgttggcccaactgtacgcaaggttatcctgatcaaattcttccggtgcaagagcggaatcgccggcacaatcgaactctggggccgggacaccacaggcaatgcgagaatggtctggagcaacaggatcttcccggttcgaggccccgtcgaacgacctatctacttgactcgagaagacatcttcgacggcgtggttgagccaggccgccagggcaccgatcgtcttgaccttgatctcacttctctccgcgacataatcgtcgagacggggttggatgccgtcgggctcattcctgcgccttgattttttttttttttttttttttttttttttttttttttttttttttttttttttttttttttttttttttttttttacgacatgctttcgcggaggtgttaggtgttagggagtaagtgggatatggtgatttgcagacctgtatcttgtattttttctcttattttttatccgcgccgatgaccggccttttaccatctttttaccatgcatggacgaccagaatgaacactgcatatacgcagaagtcaaaccaaaaaagagaaagattcgctcataacttgaaatgagatatgtaagaatagtttaaaacgcccaaatccgagagacccacgctcgccagcaaaagacaagacagcaagcagcaaacccaatacgcctcttttcgcaaacctgccaggtttcgatcctgtcagtgtagcttgtacatgatacaaggagcggcagtggtgaaaagcaatagcagcaagaaagaagaagaaaaaaatacagatcaaagagcaaagtacaatgggaagagcagaaaaggaaaggaaaggaaaagggatgttaaaaaaagaaccggatctgagatccaacagagtctagaaagacatggctgtggaaataccccggcggggatcgaggacctccacagaagaatggaagatggaggcgcagatcataagaacatgatagtacatccataaggaagctatgtgcagaagcaaaatttgcgctcatatgtgcaaggtgctaagatgatagggggtatctccgtgaaagtcgagctgaagacgtgagatgaaaaagaataagtgctgtctggaaacgaaaaaaaacactgattgtagttcatgccaccttcttgaaactgaaagatctccatcgaggggtatggccgggccgcgtgtggttggtgggttggtctttgaccaggtctttggctaggtctttggccaggggctccgaggtccggatgggttgtttgggttgcttagggtgggagatgggagggaaatgtctcggggaaacaggcgactggactggcggctctgtctcgagggatgcttctggcacggcttctgcaaggagcggcgctgtcgccatgtcagacatggagactcggggctctttctccttgctgagtcggtggctgaaacttcggctgcctcgtttcaaaaagccgaacccggtcgacttccttggtgatccattttcagcagcgaggtcggctgtgtcggctttgctggcctcgatggctcttctcaactcctctgcctctcgtcgctgcatttctcggttgtacatctcctgctctttctggcgatttctttcgttcttctccttctctttctctatcgcccgacgttctttccgtagttggtgatcactcttctttgggctcaatggggtggtttgttcgtcagggattggagggagaggcggttgaacggctcgcggcgaagctgcttggggctccgagggttcttctgggtaggtgtgcagttggggtgcggttgggattcggttgagaggagtgaagggggttgtgtgatcaggaggcacctgtgatgcactttgggcatgggcgagaggtggtgagaagggagacccattagccttgccggcctcgcttgtttcggctgccccggccatgggggcctgattctcttgcgcctgctcgcgcaggacagcctcgatagttgtctcttgatagaaaagaacataggcacatgcgagtccgggtcgatctccaaagaagttgcgcacgtaacttttgtcaactggttccacgagctcgtcgtcgaacagcagccagccacggtcttcggtcttgataatgacaacgtagtggccgtgatacggtcctccgccaatgtgcaccaccaccgcatacaattcgtaaagacggtctggatcctcggcatcgtccgtggtgttaaatagacgaagatggtagggatagacgacgcgatggaacagcttctgcagtcgctgcaagtcctctgtgtatttgaaacgcttcaaatgcaaagccagcacacgtggcaaacgtttgatcttcatccgcttttccgcttcttgcagtccgccgcagttgtcgcagtggaacttattccgctcacagagcatctcctcggccgagaactttctcagacaagaggtcacggacgaatgctgctcgagatccaccgataaatccaagaatacttcgtctcgctgcgacaccttttcacaggtgagacacttggtctcggacgtcagagtcccctcgaacagctcgtgaacccatctggtagtattgggcgatttcgaacccgtgctagatggcaccattcccaaggagtcggcacttgctgttggtggcagagccttgtcgatgaatgcctgcttcgtggcttccgtttccacattggcgacgacctcgttgaggagcaaattcaaaaactcatgcgcatcctggtgcatggcggtccggaacatctcgtgctcgcgacggagaatgtccaagaactgctgcgggcgaacgataccaatgcgtgcttggcttcctacgaccgattcgaagatgtccttgagcgaagtgaacaaggactccgacatcccataactggtcgcattgttcttggtttccaaaatcggcagggtctgaagtgccactttcttcttgtattccggcgactccttgtcctccggcttctggttgggatttgggggcacaccggcctggcgcgcggatggtggggacgaggccttttgtcgggcagccagcgcctcggcttcgaggtgggcatttgggttctggtaacgtaggttcttcgcgagggcagcctcgaggctgtccatgggtgtgcgttgtgggtagttgatgacggcttcgcggaagggcactgagtaatagagacattgcaggatggagttacagtaacaagtgtttccatactgaaagcgcggggggattgtggtcagtgccgttgcggtctcagcagactccggggaagtccgtgactcacattttccattccataaaacttgtcgctgccgtcgtcgcggatgggacccatgtcctgcagcctcttttccagaggggaaatctgcggtacctggaagtcttttttcacgggtggcgccgtggccggggggtttgaagcctgcgcaagtgaaagtcccagtcagtggcggtcccaatccgaatggtctcacggggaccgaagcatctgctgtgctaccaggttgagcgagcatggctgtgcggatgtatggtcactcaccccattcttggagcccttggagaagagcgccttcatgatggcttaatggtcggtcgcactctgcattgatgaggcacagtgtgtggggagtttagagatcacaattcgagatcggcatacgaagaagggggggggatgatggagaaggaaatgaagcgcgtccggggaaataaagtgattgtcgtttgatcacataaggtttctggggtccggtggaaatgagaggggcgggagaatgagagaaggcaccgagttacggggtaatgtgttaagggatattagggagaatagattagagatgtctgatccagcaagaccagagttaaagagaaagaaggcaagtaatgtgccaagtagcagagacaaggggagcactggaatggacccaatttattttattgtagtaacatacataagaaccagtaacatcataacaatacaatcacttcatctgcaaccgaatcgtccagaaaacacaactcatatcgcgacctaccccatccatcttagcctctctccacgtggagacctaaggcaggtactggtccaatcgccgaatttctgcctctagcaggtcctaagccggaatcgaagtctttaaagaggtacaacatcctctacggagtacggaggacaacctcaagtaaagaagaaacaccggatataccggagccccatcttatactcattggccacaacggtttcccccagcggagcagccctcctccccccacgtccatggatgagagactcctcgaccaagaactcctcggccgtgattggccaccagccaccgtcgctcacgggccatgtgtccgcccctcgcatggcgtcgccccaacagccaatggccgcctgtgtggtggggccacgaaaggtggcggtggacccggccccttccaaagttggattgttcccacggaatcttttcctgttccttacatgaaactcttttcgggggggaatcgtctagaccggaagcatcaacatctagattccattccgaggaataccttatgtcgaatgtgtccaggctaacgtcagcctatatcaatgggagtcggccccttgcgggggtccaataggcgcagcaataccaatccagtcattcctttggtaccacaccaacgcacgttcccgcgatggggcactctgttaatctggctaatctggcttcaacgtctgatcgaactcacatatgatctgcccacgccaatgggaggagcaattaaacgagcaccgacatacaatccgacggcactaagcctgtacagcacgtacatggcgggggtggcgacaattacctctttcaaggggctcaagaactaataataatataatgataaatcgcatgttcggccggcattaggagataggaaggctacggaggccgtagtgtatcagtctaatcaggcttgggctaaccagttacaacccggattaatatagttctgtcgcaaatgacgttatggactgtggagtagatcgattgagcgatttacctgcatgtcatagccctttcgacaatgtacaacacaacaatgtactatatacctaccgcatccaatatcaaattgtcacggtatgatgacatcggaatggacgtgccccaaagaggaaggagcataagccggaaggatttcgggtggcagcgtaatttgcagaggcagatccggggaagtccagaacttggctgtatacgcctcgacgcttaatatgtcttatgaccggtatgctttagagtctatatactagtaggcattggcaaggcagccaggtgatgtgagacatcagatcacagggacatttgatctcaaattcatacactccatagttatgtacatgccactattataccaaagagaccatcggataaacaaccccaaacagaataaaccggtgttatcacgtgatgaattgcgctctatatggcgtggttattgtatctttcacctatcatcgaccttagattacttcgagaaaaaactcagaaaggcaaaagacctggctcaattatgcagttatgcacttcaggttggacaaggggcaatcctcacctcggcggcgccagtgaggtctttgatatccttgaaaatatcaaatatacatgatgagttgattttgccctttcgtctgtcgccgcagttcaacatcccaaagacctctccgctgtgcgtataaacctgcaattgagagttgaagaagaatggaacggattgaaccaatccagtaggctcgtaagagaatggctacaagagaatatattagccatataataaatctccaatgaacagaatattatcttactcggttgccttcaaccttatcggctcgggacaatcttcatcaaggcccagtccatcatgatctcttgacctttcgcgttaatttgtgtccgattcaaatcgcttccagcaacaatatgtcccaagggtcattccaaataaaagcgtccacgattagtttcagacctgcaggactcctctcgaactctgcgcacctatcgacatgttagcagtgtccagcaatattcggtaataccacccacagattaaaatcgataagccacaggctgattgaccggcgagaaatgtcaaatcgatgtcctaggaagtaacttccattgtcgcgcatcgtcgtaaagggttggcgtagtgcttcaatgggcctgattggcgtagataatcccctataacgatagtgtggctagggcccagtctttgctcgaccaggtggtcttgccgggtattactctcagtcgcttcgtgaatttgcatgtaataaaggcgactgcgttgaagttgtgacgggaaactggcaaaccggtgacaaagtcaatgcatgacatccatacgtcctccttttgggttgcttccagcttcagaaatacttcggttttgtattcttcgatattatcatctatcgcggcgatagtatattggagacctctgaaagatggatgatcaactttcaatacctctggggcaatggtgttgagtgattccttgaatctgagggggctctattcccagcgcgaaagcgcggcctgcccaggtgtgctcctgtgatttgtaacatttgttgcgggcgctttccttctgggggccaaacggtgtggaagcaagttagactataggtgcgccattccgattcgttgggtaaccgtagctggataagaccacccaatgtggatgttccggtcgaattaccatggatacctatgctgacaccagggattccttcccgtccttcataaataggatatcaacgctagattcctgaaattgtaaaagtcaactccgaatgatctggcctgcggtatcaaaagacccggtggatgtcttgtcaacctccactattatagtcacagggttcagatgcctgtcggtattggtgccataccgccaacattcaataccagtccactcctggatattcagattcgccagaatagtatcgacaattgacctccatttggaatgaatggagtgggtctgttcaacggggaaacaatacagtccgtcgtaaaacttctcttcgataatctcaacagaggttccaggtaggaggggctccaaaccgtggtagatctgcttggcagcctgataccaaagatcaggttgcgggagatctggcatgaggacaagcagggttggaactggcataggttcagggtcaacctttgacgtgcggcccttcagaatgacattggagaattcgatctcgagatcatccaggacttttttttagcacgcacatggatctgcgctggatcgtgagtaaacgtgttctttgtcgtcgccgctgggagagaagttaaaattggcccacccgcacgatgagaagacttgagaaagccgctgtggtcaacatataaacctccaccaagtggagaggaagacgaggtagaagagaagctgagcgcgtgcgcactaccctactgaaggccgaagatacaactgaagattcagacattatgaatgtctagaggctgaagaaagcagatccgtaaggatacaagagtcgaggaactgtcaaagatgaagtaaagagttgaaggggtagagaagacttaaagagatacaaaaaatagtcaagaagagccagacaagaggtagacaagacagagagaagagagagaggaaaagtgcaaggtgaagtagaggagagtcaaggaagagacaaaggcaagagaggtccgaagcctaaacaggaaggagccttccaggtttacataattcacctgggctgccaccgagatcactagtatcaaattaattgaatgcaacccgtattgaatgctcgtgatggcttgattgtagaagttgaggtataagttgagatgctgcacctatcttcatctagatcaggtgatctctcaattcaactgcacctgtttggaaccgacgtgtccgggataaacccaatcgtttgtttcgcagcgttctttttttatgccgtccattcctgttccttcgcgctctgtacaacgagcaattgccaatcaattcggtcggtctccaatttctcgtctggctcattgcccgtccctgcagaatcgtcgagtcatcgcgaataaaaataatatccctgcccccaccatcccccaccaaataatttctccccgccgcactcgtcagttttcctcctcccatcgctccgccgaatcaagcacaatggggaaagaaaagggtaccaacttcaacctcaagaccccgaagggcaccaaggattggtccgggtccgatgccctcctccgagaccgcattttcaccaccatctcgaacgtcttcaagcgccacggcggtagcgcactggacacccccgtcttcgagctgcgcgagatcctggccggcaaatatggcgaggactcgaagctcatctacgatctgaaggaccagggtggcgagatctgctcgctgcgctacgacctgacagtgccgttcgcgcgctggctcgccatgaaccccgaggttcgcagcatcaagcgttaccacatcgccaaggtctaccgtcgtgaccagcccgccatcaacaagggccgcatgcgtgagttctaccagtgcgacttcgatatcgccggtactttcgacgccatggtgcccgatgccgagatcctgcgcatcgtcagcgaggtctttgaggagctgggctggagcggtcgctacaccatcaagctcaaccaccgcaagatcttagatggtgtctttgccgtctgtggtgtgcccgaggacaagctccggccgatctccagtgccgtcgataagttggacaagatgccgtgggcggacgtgcgtaaggaaatggtcgacgagaagggtcttgaccctgaggttgcggatcgtattgagaaatacgttatgaacaagggctcgcgggagctgctcgacactctcctggaggatgagaccctcaccgctaatgcctccgccaaggctggtctcgaggaaatggccttgatgatggactatctcaaggcatttaatgtactagacaaggtctccttcgacatgtctcttgcccgtggtctggactactacaccggtgtcatctacgaggttgtcaccgagggttcggccggtgtgcaggccgacgccccagaggcacaaaaggccgagaggtccggcaagaagagcaagtccaagcagcccaccgaggacgacgaccgatccaacgaccccaccctcggcgttggcagtgtcgcagcgggtggccgctacgataacctagtcggcatgttccagcccaaggcacagatcccctgtgtcggcatctcattcggtgtcgaccgtatcttctccatcaccaaggcacgtatcgagcgcgagcagaggactgatgcccttcgcagcagcgaggtcgacgcttacatcatggccttcggcggcaagggcttcggcggcttgttgaaggagcgcatggaaatctgccagaagctgtggagtgctggcatcaaggtagactttctatgaacattgattctgaacaaacactaacatcacttcaggctgagttctcctataaggtaaagcccaaacttccccagcagttcaaggccgccgaacaaggcgccatccccttcggcatcatcctcggcgaggacgagatggccgccggcaagtgccgcatcaaggagatgggtctgcctgaaggacaccccgagaaggagggtgtcgaggttgaaatcacctcgctgatttccgagctgcgggaccgtcttgcgaagaagaaccacggtcttgtctcatcgctggcgcagcagctgcagggcaccattgtttaggcgattaaacaattgggtctgcattttcatttcgtttttttctttagagcgtgtttttcagaggtttctctgttttccctactacgtagatctcttgcattgtcaggcttggagctcggcctatcaaaaaggactggggggttattgttgagaaaaaagaactatatttcagagatgggttgatgtctttaagaattaccaaatacccaattcattgcatttcccctgtgctttggtttgatacaggtttataatatggcacagcatacactatcagatcattcgagacgattcagcgtctcgaaaagacaaaggcacaacttagtataagaaatcttgcatataaaaggactagaagtacaatacacagagccatacatatacacaccacaacatcgaaactaatatccctccgcattcttcatcaagaacgacttaacaaaaggcaagcgatcaacgacgccgagtccaagactacgcgcccaagcaaccggcccttcaccaggaacattatacatcttatgcaggagatcgcaagcgccgccgatcttcgcattaggcaagtaccgctcagacgagtaccgctcaagagcaagcaaatcaccgatatccatgccatgcgagacagcatactggatcgtcttggagagcgacgcaacatccgcctggccgaggttcaggccctgaccagcgagggggtgaatgacgtgtgcggcgtcgccgacgagcgcaacgcgcggcgagacgtactgcgcggcgtgtcggaagcgcagcgggaaggaagcgactgttcctgtctgcacacctgttgctgggggagggacttgggctgggaggggggtgtgctggacgcgccaggcgagttcgtcttggtgggatggggtggaatcggaggaggaggattgcatgcccatcatgtaggtgaggtctgtcatgtcgagacggaaggcggcgttgaccatggcgaggaaggccggggtggggagggactttaggtaggctgcgtgctcgggggtcgttgaccagacgagggtggcgtggttgtttggcagcgggaggagggcgatggggccgccgagagcggggaggaagcgctggtaggctgtgcgcttggaggccgggaagggcgcggtggctggctcggcgagagcgagggttgcgacgatgccgtggcggccgtagtcccagccttgggtggggatgtcggcgaaggtgcggacggggctgttgataccgtctgcaccgacgaggaggcgggccgcgatgcgcttgggtggctctgtttccgcggcggggcctgtgggcttgacggtgacgatgggccaggctgagaggtcgggaccgtcgggtttgaggtctgagccgttctcgatggaggcgactgtcgagtttgagaagagggagaggttctcgtcacctgagtcggcgatgcggcggagcagggcgcgcaccaggttcgcgttctcggtcatggttgctacagtgcgcatgtcctcgaatggggatgtctccattgaccaatcgaatgatattcgggacccggtttggccgtcccagacctgcatgtcctggtattcctgcacgcgactaacatcgagcttatcgtaggcgccaatgctacgcaggaacgccacggtcgagggggtcaagctgctgcaccggttggagaactggttcggttcgaggtcccaggctttggctttgcggagatcttgggtctcaatgagggcgactttgagctttgaggtgataggtgatgctcctgtagtagcattgtatcagtatatgccctgcttatctgcgtatggtatacatacgaagtgcggccaatagccctaggcctgccggcccgcctccaacacaaaccacgtcatataggtcgggggaatccgatttagatgcaaattgccgccgaccggcggtaatgccatgccggcaggttgggcagacatacggccgaaggacagctctggagattggacgcatcgtgtttagtgattggaggttgaatcggatgatcgccctcaagatagacttgcagtgcaaacagtacaaacacctgcatacaaccccaggttatgtccacgctggttatggtaatgcttcttccttttttaatggctcttgataccatataaaagttcatttcatcgctattttacttcatctattgaatttacacgaatatatgaataaatgaagagttatgatggtattgcgggtatgaaacatagcgacagcaacaaatatgaactgctatatcagactcggtctggaaaatgaataaagcatgctgagacaaatacctaaatacctaaacgcttccgacagcagccgagtcagagtcatgttcaggctcagcttcgccttccatctctgctacgaaccgctcccacgtagaaagcacgccctgatagaactcgatgtgcgaatcggcaaaggagccaagtccgtctcggaactcgaccgccttgatacgttcgaaatccgcgacttcgcggatgacctcctcgtcaaacatctcggttgtggttttggcggactcgacctcgcgggtcaattcgtcaatacggagctcaagcttccgcacacgctcgcggcgggactgttcgtggtcaacgccgcgcatgtcctccattttagagcggatgaaagaggccggagaagaggtgagcggattagaggcgtagtaagcagctgggttggaagccagagaatcacgctcggtcaccgctttattgcggtaatcgaccaaggcctcgaaatcgagctgtttctgctcccgtgtcttcagcagggacttgagggacattatatacgattcggtatcgcgcagcgagcccaaatagttctggtcggtgtggtccttcagtccgcgcatcccgcgcgcggtctcttccactgaagctgcaaagacctgcagtggcatctcaacagcaggctctaacgggacaagtttgcggaactgcgtcgcgagctcggcatagtccgtctctaggtcggattcacgccgcgcaacccgtgccacgatcttctccacatgtgataggtcttcgtccagcttatcagccttctctcgcacctcgataaagcgccggtccggcttgtgcactttagagaaggcgttcacaaatgaatcagtaaagttatcaaagatcccagtggccgcgccatcggacccggtatttgttgatacccgtgttgaatgtaggcgcatatgcgcattccaatcgggcgattccaagaagatagtgagaagaggcgcccgccgaagcacaggatgaagcgtcaaacgtttcaaaaatcgatgcagcgaccaagctcgtcgcgttgtgaactccggtccaaaacgatctcctcgcacatactccatcttgtgtttgtcggggagcggcggcaccgcgcatgccgggtattcgcgatagagcgtcttgtataggaagtaaaagtcggtgaagcgccgtcgaaccgtaaaatcgggcttctggaatgatttgaagtcggtctatatatgtcagtcatagtcattttgaggatatacagatgtcgggaggtttaggcagcagttgcaccactccccgacaatgtatgcaaagaaaaaagcatacatgtgtggtaaccaggtacgagatatatgcgtcttttgtcccgtcattttctttgagcggagaatcaacctggcattcgagaacgccatcgccgatgcccgccaggtcgacggcgtcggctagcgggccggcctgaggctcttcttgggcggagctcattctccgcttgccattggtgtcgtgatgaggttcactgggttctccagaatctgtacctgcagttgtcggccgcgaggtatcgctgtctgggtcgtgcttccaagacacactgtcaaagtcgtcatgttgatccatcgtgggggtgtcggtcggccgtggtcaaccggctgatagttgttgaaaccccagtgatgccgataaatcaatatttgcaggaaatgtttgatcaaggagtgatagggactgaaagggctagagatgtggagtggagggggaggtggaggttggagctaagttcaatgatcgccgttccccaaggcggagttccagaagcggaacgtcatcatcgcaatgaatgtcaataagagttgcttgctgcttgctacttggtcctttcgctttcttatacttatattattattctaagattcatcgagattgcttcatctgatatttatttgtagtatacacaacacgcttttggattcctgtcaactggggatatacagacagacctaggatcccaacccgtctattcctaacgaacgatcctctcaattcaacaatcaagtcaacatagcaatcgacaacaccgaacaagatgcaaaatgactatcgacattatattaaggttttggtagatgggggccaccgtgagacgttccatctccattgtctttttccgggatattggccaacccatcgcgatacggctgatcatcatcatcatcactgaacatttcctcgtcactctccccagcaaatgcattatacagctcaccgccacgacgctgtgttcgaccagatgctccagtcatcggttgcatctcatcttcatcctcaatcatttcaaactcgtagtcatcgtgagcagtggtgcgacgacgcttgaccctctgcagctggaagtagacacccaatccaatgaagaaggtaacgatcatggccatggatgcataaatccaaatctgtgtacgcttcgaagcaccgaaagtgggaagccaagaggatatgtagcctgatccggcggacgaagcagagggcgtttcagcctcattgctagtagtactcgtgggcagcttcacatcttcaattggcgtggggtttgtggttgttggttttggctttggctttgcgttcacaggccggtcatgatggtcatccgggttaggagctggggtctttgttggggccgccgtaacactagtcgtggctacaggagcatcctcgtaaggatggtcgtcgtcgtggtcatcgggcagggggtggagctcttgtttagctccatcggcggcctcaccccacagattgagtcgccaatcaatgaatgcaccggtgaattcattgacattggagtctttcacgatgatggaccaatcgccaataggtgattcacccctaagaataaattagcaaagcgtatatcatggaattggcagcaacacataccaatgagcaacagacatgaaagtccaatcctcatacccaaccggcatgacatccttttcgcgggcaacactcagatagctgatgattccagcggggctgcgcagctcaacgctgatgtcgccgcggcgggtgtgattggcattcatagtcacagtgacatgttccaatttagcgaagttggcctctttcaattgatcagcagttaccgtatagtgactgagcagaccccgatcaccctgggggatctcttggtgcactcgcagccatggcgagttgaaccacgcttgaggcttcacgagatcccaagtcttagcaagctggaccatggtatatgtatcgacctttccgaaaccccagtcgtggctgaacttgcggccagagggcaggttctgccagctaccgtcgtcttcgctcacggggaccgccgtctccaccatcaagtactgtaaatcacgccaggtcagctccgggcgtgcactgagcgcgagcgccacgctgcctgcggccagcggaccagccgcagaggtgccaccatgtccagcggagcactctcttgcaccgacgtcggtagtgtgaatataagcaccggagccgctactgtatgcgaccacaagttgggccgagcatgactcggagtaaggcgggtgattcccttcccggtctatggcaccgactgtaatactgtagatactgttggtatacccatcgaagttgcagttgtccccgtaggacgcaccgttaccggcggcaaagacatagacagagcctttaccccctctgcccttttggataccgttgaccatggcgcgcttgatcaagattccaggcgcatccatagtagcaccatcgtcgataggcccccatgaacatgaatatatgtcattcttctggtaggcgtagttaatagccgccgcttcatcgacatcatcgataggcttggacaagatccgaatgccggctatcttgctatcgtacgcaacaccgactccacaaacgtcgttctttgccgccgcgatctcgccgcagcatcgagtaccatgcttatcgtcaagcagaagagggcggggttcggggaggccctcgttgaaatcccaggagccctctggaaggtagttaggcttgaggtcatagctatccatgtccagcccatcgtcgacaactgcagtggccacgcccttgccggttatcccctccaaccacagtcctgtcacattgagatcgtgtccgggctgttttgtgttgataagatgccattgttctttgaagatcgggtcagtgatccctagagttgacatggcatccttccggaaagcaacggcctgcgcatcttccctcttgtccagcgatttatatggtacggagaccggcggaagtcgtttctgcaatcgttgtctcgctggagcaatcttatgcgaccacaggatcttgtctaaggggtcatcacttgacccgattgcgccggagcgccgccggagctttcgcctggtccgtaaatcattcaacaaggtgtcaaactgaggggtctgttcccgcggtaatgaaaaagtgtggtggccatccagttggccaatctggccctcgtggcgtgcgcctaggatctgtgcgatgtgggaaggagaggtggtatcgtcgagctggagggcgaagaagtcgcgggtttcttgagagcgagggtgtaggttcgcggacaccgcaccagcaagacctagggtggcggtgatgccgctgacaatgcgcatgatgaggaatcaattgttttcgaggaaagggatcaagggcgggttatgaggttcgaggtatctagcgggtggttgccatggacagttccggaccgttgaatagcaacttgagagttgtggtaaggggtgtactccgtagggtggacagaaaggaaataagctttaacaagaccctatttccaaggttcacaatagttggtaagaggaggttgtaacagcaagacacaatgttccaggcgaaataggaggatcgtcagaggtcacccacgcgaagtcctattgagtctccggaacggtctattgagctcgacttagttgatttggacaagaagctttttctttattaactaccagagaacgttcggggcgttctaaggccacggtttccactctgttctccgtattgcgtgagatattattatttagttacttgtctagttcccagtggatgtccgggctctaatttagcttacgtataggcacagccttggcccgccaggcatacgtagatagctaactaacaacactatccttactccatactggaattcatgactcgattgcttgatatttggatgctacggggattacggtgtatttcatcaataattcatatcaactgcagcaatcgaatagctcaagtccttgcatgagcaacatagatctattggctttcctctttcactttaaatctactgccgccttatgctaggtataattgagtacgccctgcgatcacataatagcctgatcccggactgagatgtacccagttactagactcacttaaagcggcacctgaaataggataaaacagaacatcgaggtacttatgtctacatgtatggagtatatggatggatagatggattttatgtgaaatgatcatgttataactgtgaaacatcgattcccagtatccagatacttacgttctatatgttcgtactcgcaaataggtatgtgggtaaccatagtaccgagtccccataccaaatttaagaattatgcttaattctttatttccattctatggtatttcacttttgaatatctcatatttaccctaacgtcttggaatcccgcatgaatattgcttttccaaggatccaagccctcgataaagctttcgtatgacagtggccccgcgcgaaggctggggataaccagccaccgggttatcggatgtatagaccttgctggtttatttttggctggctggacttgattgaaatctttcacttcttttcatcacattctctgccatcccattgatacccctatcctagtgtttatccgccttatagacaggccaacttccctgtcaccgccgcgtggacctatacccccgcccaacttggtttgttgcctgcgaatcagctcgggccatggtgtggtgaccctgcgttaggcatcagatccagtcgcattgaatccgttccatctattccaagaaaaatttcgacaaaagtcaagtccggcaattttccctaaatctgttcgaattgccttcgggaccgacattagcgatattcgttgcagttgggtttgcaattgcacatacttggcgctctatctacgctttttccagtcatttccttgagtttgggcgcaaatacacgacatcatggctactatggcaatgcgtcaatcgcctgatatggcaaacggcagctctaacccccagatttccaatggagcgcaaagagctccagcaaggcgcaatcgtcaaaagactccttctgcggaaagctccgaatacgaggcggaatatgataacccgaagacggcccagaccagtgggagcgatggccttgcgccaggacagggagacaagtctttctcggccagggcccgaaaccagcccgaggcaaacctgaactatacaacccgcaagccgattcctccatcgacaccagagttatcagagaaatcgtccacaccgcgaggtctttccacagagccctatcacccagaacccagtgcaaaaatgcctgagatccaggtccagtcaccaccacctgcaccagttgtgtcttcgcccccgactcggtccaacaccacacgttcgatctccgccaatgactcgcggccagactgggcatcagagcgatcacctcttcaaaagttggaggtaaccttaactggaatcagcaaggaagagaagcgagcacgagtacaacaggcagaaatcaaagcccgagagcgacttgcgcgcaagaaagccgaacaagagaaagccgaattagcggcatcattagcacgcgaagcatcaacacaacgtgcgcagccagaaagcgaaccatcccccggcgcagccagacggaatgaacagagagatattccaattggggatcgaaaagaggacggcatgcgaaatggacacgcagctacaccaccacaacagcgacaaccaagcatagctgtgcgtcacaatcggacagtttcagcaaatccccaatatcaatataaccgccgccccgaagaaccccaatatacacgcgcagaagctgccatcccactctcagctaagataggcaatgtgcctaggcgatcagtcacagtgagcggacctgccgcgaaaccagcacctgccaacaatatcagccacagtcgatcgatgtctcaagcgggtcctcgacctatgaaggcttccggtgctctaagagcggagacaacagacgaaatgttaacaccacctcgtgcgcaagatagcgccgagtcgcaagtcaggcccaaaaaacaatctaaacagtctgtgtctttcaatgtcccgccgcctacgcccccgccaatctttgaatggaggaatgcacagcctgctaggcttgcggcccttgacttggatatccagaattttgatgtggagcgcagcaaagcgtggtgggcaggtgccagtaacgaagatcgtagaaagagcagggctcttcctaagaactacaaatctcctgctcagaagctgacaggtaaggtcctccgttttctagttttcaagctagattttttgtcaccgaaatgcatttactaacgcccactaggaatgactgagcacaaaaatttccaaccccagctattcttgcgatgtggacctttgctacgatacacaggtatccaacgagctaggcttgatagagccagcggccccattgaaaaggatatatggcgaggatctatcatgatagtgactaaagattcccgctcctcctacgacactccacccacactgagactattctctcaaccgatggatcttcttcctcctccacccgtggagatcagccatgaagatggaatgcaactggctcctgaatatgtcgacccaacagctgggctcatgaaagtcggccgtgatgggcggcccctttacgtgagaccagtggaacatgtcgaggaacaagtcgacctatcgtttgtagagaacgacgatggcatctacgagctctcacctagcatgatcgactatactagtgaaggcatcaaacagcctatgacttccactcggatgccttccgtcgacggtgagatggcgagtttgtaccgagacattcctggagcccgtctgtacgccgatgccgcaagagatgtaacgttctggcgattcaacttagaggttgaactgagcacaacgcaacagcgaatcgcctatcggatcaaccagggacccgccctgggattctgggtgcccccagctggagaatccatgaacattatgtttcacagcggcaacgggttcagcccctctgtggactctgatcgagtctgcgggcccgatccgctttggcgagatattctcaatgagcatcagactcgtccgttccatgtaatgatcggtggaggcgatcaaatcttcaacgactcgggtatcacagagtcgccgttcttccaagaatggcttaggatgaaaaacgcagccgagagatatggggcgtcattcactcgcgagttccgcgctgaattggagcagttctatctcgaccactatgctgcatggttctctcagggcctcttctcgttggcgaactctcaaatccccatggtcaacatgtggaatgatcatgaaatatttgaaggctttggttcttaccacgatgatttcatgcggacttctgttatctctggaattggaaagattgctttcaagtattacctgctgttccagcaccacagtgtccccgatgaaattgaggcagatgaacccagctggcttcttggtgctcaccctggtccatatattgagcagaaaagccggaacctgtttatgtctcttggtcaaggggtttcattgttgggtcttgactgccgcactgaacgacgggtatgttactccaatcttccgacttatggactatgctgacatgttgcagagcaatgaggttctcagcgaagagacctgtgatttattatgggaccgctgccacagggagatcatgaatggagagacaaaacatttgatcgttctttcaagtgtccctgttgcttacccccgagtggtatgtattctgattgcttctgtctttgatcgaacctaaaactaacgtcgaacccaggcaatgctccgcaatttcatgaacagccgcaagtcacttggcaaggctggagtacttggcgggcttgtcaatcgatctggcccaaatgtggaggtctttgatgaccattgggctggcaagcacctcaagtctgaacgcacatggttgattgaggatctccaggatctggccgcagagaaatcagtccggatcacaatactcaggtaagaccagaaaagtcgcttaacggcaacccaaattctaaacgataaaaactaacgaaatccttcagtggtgatgtccatctcgctgcaatcgggcagttctattcgaatcccaaattgaatatcgccaaagaccacgattaccgatacatgccgaatgtcatttcatctgctattgcagacattccggagaccgatcttattgcggatatgatcaacaagcggagtacactccaccacatggactcgaacaccgacgaggatgtcgtccccatctttttccaggatgtgaatggcaaggctcgaaacaacaaacgattactacctcggcgaaactggtgttcgatccgtgagtataagcccggatctactccacctgatacacctgagtcagagatgatagaggccccggaacttcggccaaataagctgcagcggacgttgtcgctgggtcgtggagaccagggatctaccgggaagcctggtattctcaggcgcctttccacccgtggaccacctcctacgaggactatgagcttcaatcgtggcgatgaagctactttcaatcgacgtgcaagcttggatgggcctactcagccccacgagaacggagacagctatttcccagggaccggagccgcgccacctccacgacccggcagcttccaccggcgaccaacgaatctcagccaaaaagcggcaaggaaagcggcgaagatgggagataacggcgcaggcgcctacatcaacctcgagggcgggctcgccatcactttgaacctcgagatcagtccacaagacccatctggggtcaccgcaccctacaaactgctcgtcccagcactacactacaacggaaccgagtacgacccgcccccagcgcagattgtcaagggctggagaaaattcctaccccgccgcaaaaagaacggggaagcaggtggacggcccgaagcagatgattacagtgacgacgaacaagacgactacgaggactacgaccttatcaataatacccgcgctaacgctgccactagccaacaacatcaaccacagtacgagggatatcctgggagtgaagaggaggatggagattctgagggcgaagtccctcaacgtccaccacggcaggttatggctgaacaatcccccagttctgaggagcatagccgtccgcgaaagaagaagtggttcggcgtaatctaatgtactatattgataccattgtgttcttgatgttggctgtgacattttctttttgcgatctgatgattctatggatttctatgagtacgatagtattttttgtttgatgtatgattcccctaatgcagcgaggttcaaactgatatgtgatgttcattctatcaagacattccgagtaaagctgaagtatacaaaaatcgtcggctctccggtgtcttattaagcgattcgggccggggtgatctgacgggattacatcagcggtctcgacctctcacgtgatatgtgcttagaaagccccggacgatgttcaacagactcagccctgatttgcctcggaattgctcgaaatcgccttaaatcgcctagtttaaacgaattatctctaatctcgggtggtctggaaaccccagaaaggcacagaatccaatcgcatcctgtctgaggacccagtctctctgatctcattgtcggtttatcaatcaacttcatcacctaatcctggtctccactgcccctccgaaaaaagacattatatctccccctcctgtccccttcccctccacttcccatacacaccttcaagctgttttcctccgcctttcgtcgttttccctcccttcgatccattggattgactgccgctgcggccactaccgtccaccaacagtctcctccttcggcctcggtcttcactaagtcgtttccgacgccgttgcgcgtcaatcctaacaccgccagaatggtgcactctaaagtagtcagtaagtagtctttggagtggatcgaatggtcctgatcatcttaatccctctgataccagagttctaacctcatatcccccacagttatcggctccggccctggtgctcacactgccgctatctatctttcacgcgcagagctccagccagtcctctacgagggcatgctcgccaacggcactgccgccggtggtcagctcacgaccaccactgacgtcgagaacttccccggattccccaacggcatcggcggcgccgagctgatggacaacatgcgcgcgcagtccgagcgcttcggcaccgagatcatcaccgagaccatctccaagcttgacctctcctcccggcccttcaagatgtggaccgagtggaacgacgacgagggcagcgagcccgtccgcaccgccgacgccgtcatcattgccacaggcgccaacgcccgccgtctgaacctccccggcgaggagaccttctggcagaacggagtcagtgcctgtgccgtctgcgacggcgccgtgcccattttccgcaacaagcccctctacgtcattggcggtggtgactccgccgccgaggaggctatgttcctggccaagtacggcagcagcgtgaccgttctcgttcgcagggacaagctgcgtgcctccaaggtcatggccgaccgtctccttgcccaccccaagtgcaaggtccgcttcaactccgtcgccactgagattatcggtgaggacaagcctaatggtctcatgacccacctccgagtcaaggacgttgtctccaacaaggaggaggttgttgatgccaacggtctcttctacgctgttggtcacgatcccgccaacgccctcgtcaagggccaggttgagctcgatgacgagggttatatcatcaccaagcccggcaccagcttcaccaacatcgagggtgtcttcgcctgcggtgatgttcaggataagcgttaccgccaggctatcaccagtgccggtatgttcagaccccggttcgtccattataagtttatctcgctaactcaattttctacaggatctggctgtgtcgccgccctagaggccgagaagttcctctctgagactgagtctctcgaggacgcaaagcccgtgctctaaatacatatatacacctcttcccacaccttcctctcccatttctcgttgtcatgatacatgaacacatgatgtttggcccgtgtatcgagcactcttcttgcttctagacttatattttaggcgatatctcatttctaaattccccgtgcatatttcgattgggttccttgcgtctttttctctctttcttgttccctttctgttgcccacgtctcatggaagaggaaaccaagtggtctttgtggttttacatcagttggtctgcttaggctgcttatacccttagaaatagaatagaagaaaagcgaggctcctatgtcatcctcgataaaaagaactcagaagggaatttcgttccttcccatcatacaagccttattaggaactctattcccatgcaccgggtagtctataagttacgagtttggaagctcttttatcagattctcttaaatgtctagataagcaagatcatttgaattaaaactgccgaattaaaactgccgtttatgatatgtatcaatatggctgaaacgatactcatcacaaaagtctctccagagacaaattaccctcttcccttaaccgccgtctacgcagataacccacctaacgccgtaaaaaacgaatgagtcctcatttctcagacttcacaggcacagcagctgtgaatgcagtagcaagcacaggcaccgatgactcattttcagcaaggtagtccggcataacccaatcagcaaacggattctccgcgcaccagcgatccttgacgacaaaggtctttcgctcccactcggcaatgtcgaccttccacttatcccacgcctcggcattagctcggcggttaacctccgtctggtcgaggtagggctttttatcggctggcgttgcagtgcgccacatctggcctagcgcagcgcggatttcgtcgcgcggagccttggcgttggggttgttggatgctgcgcggcggacttcgtcgcattggtcgcggcagcgcgcccagtagtccttttggtagaagaggaaagggtttaggcctgattttgcggggcgtggtggtgcggaaccgagctcggcgtagatggttgtccagagggcttggtcgtaggcgtcgcggcgggacttttcggttgaggttggtttgcgggaggtggaggttgaggggggctttggtgggttgatggttgggcttgaggtggaggagagggatgagctgcctcttgttcttttcttgatggttgagccgtttggcgtggaggatttgcttcgggttacttttgacttttccgggacaagtgggtgaggcattgtgatggggccggatatcggctcgattatttctgatgctgcgcgaaggcctgagaggtatgctccgtggacggttgctgggtgagtgccgcaggtggcttcaccggcgaaatggaggtttccgattggccgggccatcaggtcgtagtcgtctgggaaggctgctgcggccacgtaggagtagctgccatatgtgaatgggtcctggccccaacgggtgatgatggtctctagaggaccgggaactttagtgtctttgaagacgtttcgaagttggccagtgacctccgtaattatttcttcgtctgatgtagattctgcttggtgggctgcgtcaccagccatgagggcaattaagcatgggagtccggtagtcttcatgacattccagaacagatagaatcgaccgcggtttgccgcgtaatcttcttgaaccatagaagcagcgttattcggctcacggagtaggccaaacatatctcgcttggtgtcccagaacggctcttcgaacactaaaatgaccttgttcattattccgaaccccagtcggtcaattgcgccacgcttccagtccggaagaggaggctcgaacttgattttctgctgcttcaggacaccgagggaaccggtgaaaacgacatgatctgccaggaacttttctccaccctcgcactggacaactgccttctgtttcttgttggacccagtcgtatcgtaagagatctcggtcacaatcttgccggtacggacatcgagcttttctggcagcatatacagcccgtagggtaattgctggtagccaccaatgacctgggaatgttcaccctcgaactcgtttccgatgtcctggtcccatcccgacaggctaagtctgttcacgttggatgcattcgcgtactcgagattggcgaaatgccaattcatcaaccgcatatccttggttgtcaccggaagcatgttttgatattgtttgacaccctcgtccataactgcaccgagagtctgcgcctgggatgccatggcaatctcgtccagttcaatggtgtcattgactgtgtatcctgggttaagcttccatccagttgcctggcaggtcaaggctgccgggtcatcttccgaatttcccgctagatcgctcgccacatcgacggatggttcattttcggcagtcttgtgctttattccccgtctaactcgctttgtggggaccaataaatctattgtcccagctgccctcgcctcttcatactgtcgcacagtaagtccgtcatccaccgctgattcgcggccagtgtcaatcaactcgcggtttccctgggcggttggcacaatctgagctttgtgacgatagaatccggttcggtcgagcaaatcattgtacagcttttctgccatcgcgtcctgaacctcattcacgggcgatccatcgatatcgtaaatcgtcgaaacatcccgtatcttgtgatagtgaagtgccagctggccacgaactatctggtctagcgggttgccatgatcgaagccgacaatgatctgagcacccatttctgcctttgggacaagcccatcaggcagggtttccgacttgagactgtgcaacgggtgtgaataaatgcgtccaccgactcttcgacgtccctcgagaacaacgactcggggcatggcatttgaatcacggtactggcggaaaagactctccagttgacgtgcacaccccagaccagccattccagcaccgattacaacaattgtaggtccttcttttcgtcttccgcgtttgggtttcactggggccaatggagcctccacgcagccgtgattgatgtagccatttcgcgcgagccagtcgtaagcaaacgaagccagattcatccatcggtaatctttggcacatccgagtgcttcttccctgctgacagctaccatgggatttctcccccagagaagcagtattccatttcgtatgttgaggtagattgtgacgtgaacgtggcaaagatggtcttgcagaaattcttgttcttgtcgatgaagagcatacgggttcagccgtgatgcatacgccgctccaacacactgctcgccgtaaacagaggggtgaattttagatgggatggacgatctcggtcgacatttggacagatcaactttcccactctccaaaacattcggtccaaagacaactgaaggcatagaaagagactgtacgggcttgggtggaggtgatgtagatgcttttagctcaaaggaagatgtcaagtcagttgaggttgtcgactcattcggagtaccgctactgccactggcatacagtctctccgttgtgccaacaatgtgggatccatcagacaggaagctatgcgacttggcgttgttgttccctagatttcccaaggcaattgatgccgaagccgcttcatatgccttgtgcgtgatgcgtagtcgcttcgcaggaggttcagatatttcggtcggttcagatagaagatttccttgaccttgtaacgtgatctcgtgatttggaacatattgattcatgtatgaatcttgacctgggggaattccggcctggaatctcatggacgttgcgccatacatgttgatagcgagtatctgcagacaaatcctcaaaggagggtgttgatgatgatagaaaaagaaaagaaagacacttccacgtgcaagaagacgtagttatggactcgaagatgtgatgtcgacagtccttctaccccgagagtgtgtggatatcaaatatgcaggcgttcgcccatgacatggtcataggaattcgagctgtggcaagccgaaggaacacagtctgaatgaatggatcaactgtattatgttagatgagatgtgatatggttcaaaatgaccagggtatgagagagtagaccgaggcagcacggatatcaggacatacatcgagttcatcccccacaaaaaaccctcccaaagaattgagaataaggcccatcaaacagggcacgaatattgttttggaacaaactaaacgaattgtaattgtaattggattgcgaaacttgaggaagagacagtgagaggaccagagtagaaaaacccttgtggcttgattcctcggagcggggcgtatttctcagtccggcaggttgcggcacccaagttcgtcaacgtccaagggctgcgctctctatgttcttcactttaggatcaatccaggggctacttgattttcatttggttatctaggtttcaacatgagtgtgcagaccataggcaccatcctcccctgcgaacccgtccgagtcattatcggtgaactcatcgtgatatgatctcctgttcgagttttcccagcccggctggtcattgtcactgtcgtcacccaaaatcaggtcaacattgtcgtcgtccagatcagtgaatcccattcgctcttcttcgtctctcgcaattgtgagagaggctttgtttacatcaggatcttctgaaaacccatgatgagggcggtgcgctgcatgatcagcttgaagcgaatctcggatatctgcacgctcttgggcttcgagctcctttgcgcgggccaaagttctaaaaaatagagaagagaaggatcagcatgagtgcacaaaatatttacgaccgatgaatttggggctcaaacctttggtatatataccacccggtgaagattccaataccgattgtaaggataatactgcagatattcacggccttggatcccgcactcatctcctcgcccttttcggagagcagacgtatccgactaccgatgaacgcaggaaccaacaatttgggagagatgatggctgtggcaagtccgtacatcaacggctgcaccgtaggaaatgtggacacagctccgttgcagatcgagtagggcagcgggcataaacggatcatacaaagaagtttgaggccatcatatttcaatgtcagggccaatgcggcgaatcgcttgtcatgttccataagacgtttgacgaatccagacagaattgtccgcgaaacataaaacgagacagtcgagccaagaattgttgcggaagcgtaaatcaaccatctatagaagaaatctcgagttagcaatatattcacttttttttttgataagagcaacatgaatcagtctcttaccctttccatataccaaatataaaaccagccacagtcccaaatgttgaccaacccacaagaggtggaaatgagacaaaaaagacacatagccacaggatcaaggcggcgagccaggatgtttcccacgtctcagcgaccgggccaagccagatgaacagcttccccgttaacaccaagaacgcgatcccggatagacccaggaatatagcagcgaagcaagccccgatttttttccatagactcatcccctcccatatcttattcatacggacatataactctgtgccgcgctggattatctgttcgcgatagcttgcaccctgcccgctcgatctgccggtgtttagcctaccggcgcgactccagggcggatgaacatcactatcaggagaagaaggtatagggatcgggggagatggtgagagagatagcgccctggcggtggacaggtagtccgcgggcattgtgaaatgtataatcctggggtatcaatgctcggcagaggatggtcgaatccggggaagatgaaccactgtaaaacagggaccgacaggaagtgcgataccagggtcgatagaatatccaaagaagtttcaagggcgtgtcaaggccctgatagttggaccggacatggaggatgagccaagcacttttaggctgaaaatcaatttgactctgtcagcggatcccgccggacttgagctcgggtggtgattgatctacatgttgtctatgttgtagggctatcgttcagttattttgtgctatttatactataagatacatatctaactctattttgtagttatgtctttgtatctatctatgtccatatcagggattgttgattctgtaagagtgtagttagcccctaggtatgtgaagcttgttattttatctacctatctctgtaatgctatatttcctttagcactcacatatcttatccttactatattattgtgttgttatattacccaaacaggccgactggaggtagttggagctaagtcgataagctgttgtgccccagtgttgatctccttctccgcctcccccctctttgtcacttcaccctttattcaactctcattcacaaacgtcggtcggcggcgatgcgatgtaattatctgcttgtcatctatcactctcgcaactctcatcaccttgagctataaccttgaaatcaaccttggaacccctgttgttcttcactttcttttcccatcacctggcatagacagaaagcatgaggtacctctgattctcgactcgtcttactttcgtcaagcatattcgtgcctatacctctaggcttcggacatccttttaagacccaatcccttcaacgctaaggtgttttcccgcttatcccggtccctttcctctacacgtattacacatatcggaatacaccatggtttccgacgagcttcttgaagaatgcctccagatcctgcaggatcaggcactggatgaggaggaacaggtggagaaggtggaggacttcttgcgtgccaatacatcattggcagggacacccttggagaatgcggtgctggacatcctctggcgccatcgcaatcgaaacttgccagacgcatcacctccagtccgtcatactgtgattcgccgctcatcgcctgcgccatggcagatggctcgatcatctacaccgctatcccctcattcaactttggggacaagccctggaagtacctcgtggatgcaaagctcccgtgggccgttctcgcggcctccgctatcttctactgcctccccatttgggtctccacgcccatcgccccggctcgcccttgcacaacctatccctcattccccaaatctgaatgcctacgagttctcggaccaaagccagatctctgactactatggagaccttgggggcgataacaatgttgactggctagtcgcagatgatgccaacagtacaacctcatccacgggtggtgtcagcactcccggggcactcagcgccactgcagttgaatttgttccggatatgagcccacatgatatcctgcgcacggtgctgggtgacaagcgatcaaacgatgaaatagaagctgcactggaggctaacagttatgatctcggtgccaccatcgcttcgttctcgcaggatatagaatccgaggcgatctcaaagcaacacgatgacggtcgtgtcttggttggcaagtctatgacaatagaacaaatacgcccggtcacaccattgggtagcagtcgcagccccgtggtctgtaagtactggctatccacgggacaatgccttcgagcggattgccgtttcagccatgacctaaacacacatgtgtgcaagtgagtgttttttgaaatctgggtaagtcaatcgttctagcgctaactattgtgaacaggtactgggttatgggaaattgtctagctggcgatggatgtcccttctcgcacgatccttcggcgcttatcggaaatctcagtgtcacggatagtagtcgaccagcttcgccctccccgttccaggtagacagtggttctgacgcattcccacccctgcaagtggcagataacggtgatcaatgggcaaatcaatacacgggccgataccctggccatctttctgcttatcaacccagcaaatatgcgcctcctggcctccatcctggaatgggcaaaagaagtggaagtgcaactcatctcggacgccccagctcccgtccatcaagccgtcaccagaatcgggagttgaatcctgctgcaccgtctgtagacgatccagatgccttcccaactcttgccgcagtcaatgctaagaatgctgggaaaaagcatcatgggaaacggggcggccataacaaccgcgaaactggctcaggaaaagaaaataccccttcgtctctggcggatgtggttcgaatgaccccatctcctgtccccgggaaaaccaaatctggctccagaaacaaagatacgaagggtcgcgagaacagtgccgcagctcagtcgattccacccccgcaaaatattccgtggttagagacaggctcgcgggcgaatcaacaatatatcaaatatcggacagaggctattcgccacggtactgtgcgaaacaagttcctccagaggtaagctttcagcgagtaatatgatccccactccttctaacgatatatctcccagcgctgcccaagcatggaaccgcaacgatgcccgagctgccaaagcattgtcgttacgcggtcaggccgagaacgacgcgatgcgcaggtgtcatcgggaggctgcacgccagctctacgaagaacgtaatcagcatctctctcacaagggattggatgaatcctcagaagagctttacgttgaccttcacggtctccacccagaagaggctatcgaatatctcgagaagatcctgctcaagcatgctcgagaaggcctccgggtggtgtatgccatcacaggcactggtcaccactcgaagaacggcaaagataaaatcggcaaggccgttaaagcatggctgaacgagtggcggtacttgtttcgggaattcagtgtacctggtgagcgaggaggttatgtcggagggattctcggcatcgatccaaccagttatgacaagtcagtagccaaggagctggctagcgaattgatggaggccaacgctggcggagagcctcccatcctaaccctgggcaaaatccagttactcaagcgcgaagaaatagagactcaagatcaatgacctggcgtgtcattcaactcaagataccccagtaccaatctatctattgaatctaagttgtatagaaaagtcgtctgcacaaattgagccttttcgcccaaatttgtgactcaaccacaagacgcagcagatgcatcaagcgaacacgtcgggttcttcaagcaatatttttaggacagattcttcctggctgcatgcttctatatactagcaaggctacggaatacaatacacagtagaaaaaggctcttctccagtagatgcactcatataacatactagaaggtacaaggaacatgcaaggatatatgcctagataatacacagcgctacatatataaatcatctactctggttcctgatgctgccactccttcctcaaagcatcaacatcaaccccacaagcctcagcctttttgacaatagccctagccttattggcaacaggaacatcaatcatcttcccatcaagagtccaagcacccctccccgccctcgcagccttatcatccgcaataacaacccgcatagcccactcagtctcatgcggatctggcccaaagatctgatccgcaaccttcacttgcgaaggatgaatacactgcttcccattgaaccccaaccggcgcccatccagacactcttcctgtagcacagctggcggcgacccatcccccttctcagacctgtacgccgtgcagacaaggtcaatcgttgacggtagctccgccgcccgcgcagcggtggctatcgcacatcgcgcgaacagaaactctgtgagcgagggcgtccgcgtgatgctcaggtctagggcgaagtcttcggctgcgaaaattaagccttggagcaagggcgaagcagtgcagatctgggataggtttgtcagggacttggcggactcgactagagccaggagtgagattggggttcttgttccttctgttggtggttgctgggatagagtgtgggttatgacgtctgtgacgaatgttaggtcggaggcagagttgacttttgggattacgattgttgttaggtttggtgattggagctgggacggttagcaagttgaatgttaccagggtggtggaagggggtgggagctatgtgtgtgtgtgtgtgtgtgttctggagtccactcacgacttcggtcaaatcacccaatgcgagtccgctgtctacggaattgattcgcacggcgcgttcccggattcctggtggcgcggcttggtcaattgctctccgcactagcgagcgcgcctctgctttcatgtgcggagtcacgctgtcttccaggtcgtaggtgacgcagtcggcggtcagtgagcgcgacttatctagaaagcgttgggaggagccggggactgttgggcgttgttggttagctctggggtttttcttttggagttcggggtgaaatgcggggaagacctcgggatgcgatgcggctttggaagagagctcgagcttaccgtagaggagggaacgacgcagagtatttcgggctgccattgtcgatatggtgatttgtgtgtgtatccaatgatatagagttgtgtactgttattcttggagagtggaggttgaggtctttatggggttgactcgggaagaagccgactcggttatccgtaaagccgctttgggagaaggttagcaaagttgttttctccttatatttctttttcatgacctgatacaacttatgagatgtctggtagtagctcttcttactatgctaacaagcagttcatttaaatcagagaactcaggcataagtactctgtagcgaagctcgatttagatatatatacttgcaagtaaacgtattttctgtatattccagatttcaacttcgtgtcattaggtgtccaagtcccattcatctagcgctgtatttctagagtatatcgcaggcagcatccaacaaacatataacgctagtattacacaaatgtgctgaacatcagaggtactctagaaaaaggagtctggagcggatgcacacaacaaagatcaattcacctttgaagaataccatattaaggaggaggaacatattgtaggtgagatcaaagagtcactagtgagtgccaccaaaacataattatagtaaaatgttttcctaactctcgcctataataaggtaatctagatggtacttgaatcacccgaaaactactacatacatacttatgtacttcatactctgcatgtatgggtattgctatgtgccttttgaactactttggcctccttgtgattttgatgcagaggttctatactccgtatagatcagtgtcttatcggtttagcgccacatacgttggacataacgtgtggctgactggtatccactcagcatagtcacgtgaatacctttagaaattgtcccgaagcaggagtaatgatcggatcttcttatagatcttctttaacaattctaaaataacttcacagtatgctaggatagatcatgcagctctagctaagtaaatatcacacatcatcaacgaatatacttaaggttggtctatgcttccgattattctgccatcagaaaccgcctatacccgtgtttcgaccacatagggaacatcgccggtcaacaacaggcttaacttggattaaattgacccaatctgctgaccgagaggtcctttacattcataccatatcaaacccctgccctgtgaatcatggaccaaggacaaggaggccaaggcgagctcaactggcgcctcagcgcgcacccgatcacgctacttgtcttcttaagtattcggatcggtccgtattcccccaccccgagtaaaagcagcaagaatgatttggctaacttcatgattaggcgcgctactgatgtatctatttggtgtactcttcatcaacaacttgtacggaacctgcgaactacccgcctgtcaacctgcgatgctaacgttcatgtagtatcctcgtcttcattttcacccttctcctcctctccgcggatttctattacctcaaaaacatcgcgggacgccggctggtcggcctacgttggtggaacgaggtcgacacctcaaccggcgactcacagtgggtcttcgaatcagccgaccctaacgttcgcactataaccgccaccgacaagcggttcttctggctgagcttatatgtcacaccagctctgtgggtagcccttgccatattggctattgtgagacttgtcggtgtcatttggcttagtttgattggtaagttactcccaagatactttgatatatgccggcagtagatattgactttggtttagttattgcactcatcttgactatcacgaataccatggccttctctcgctgtgataaatttggtcaggcctcgacatatgccaactcggctctgggtggtggtattgtgaacaacatcgctggtggcctgctgggcaggctattccggtaatggtaggcaggttgatgcctgtcttgccgttagtggccctacattgtcatccctcttgtatgtgctctgtatttctagcaggatatttgaccacttagcattcaaatgcatcaatttctttcaaaatatggtctcatttgtagctctaatgtgattgaaaacccggtctaatgtaagtgctttatctctagagccgttgcctcaggtaggtcaacgcatcactctttcctcaaacacgcagtttccaccgcagcggcacctgccgattgccctttgttttccttttcctcctcttccctcttcatctccctcttcttcttcctcttcctcttctccattgacttcaatcatcgtcaacaaacagcctttgcgtctactgcgcttcaaaccccacgttggtaagtgtcgttcttagtgttgaccttgcaccatctctctcgatgaccctaggagagcgaatcagatgaaaatatcgtgcttcaattcttttatgtgtcttgtcccatctgcctttgccttctctcacccctccctagccctccatccatccattttttaacttacgcgctcctaaccattaccccagtgaaggatacttcacgacgacagactgttctggggaatttgactaacgagcctgtgtatcaagttgaccaaaatggagacaaatatccatgaagaccggaatgaagattttacctgcggacagtgagttctcccctccaaaattctagctttcaaggcttaggatatccccccgagaaaatcagtcacttaaaaattctagatgcggtggatctggccatatgactcgtcagtgcccgaatgcctctcttcctctgagacagagagacagcaatgcagggtaagttggtcctacactttccatgtcacattctgccagtccatctaaccaatgctaagatatagtgatgcctatggcaactacggcaacgacaatggtggaggacatggtgattactccggtggtggcggtgaccgcgcttgctacaactgcggccaagaagggtaagtcgttgatatctgtgtacttgccaaattttactgacaacaatgcagccatagcaaagccgactgtaccgagcctcgcaagatgggggcatgcttcaactgtggccaggacgggtgagttattattgaacatcttgtgtattacggcgttaattattctcttgaaacagtcactccaaggccgaatgcaccgagcctcgcaagatgggcgcttgcttcaactgtggcgaagaagggtgagtaactgctgggcgttttatactttagtttgctaattggctccaaatacagtcactccaagtccgaatgtcctaagcctcgcgtgttcaggggtacctgccgtatctgcgaaaaggaaggccacccagcggttgattgtcctgagagaccccccgatgtttgcaagaactgccaggcccaaggccacaagacgatggagtgcaaggagaatcgcaagttcgatctcaaccttgttgctgacatgctaccccaagaaggttgggctgcaatgaagaaagccagtgacgaaagggatcttgatgatttccgagaggtaccaaaaatccatacgtaccttgaaagtttcgaactttggctgacctaactccaggcacttaaaatctactccaaggcagtccccaatgccacctgggcagacattgagaagaagatgcgagaggataatttcaacatctacatcattgctatggtaatcaatcatcatcgttctgatacttggggatgaatcgctaatgaatgaattttaattataggaggctgaagttgacgatgtcatgagccttatcgatcttcagggagtacttgaccgtgagtacgtgattggattctttttcaaccccaaggcgtcgcgtggccacctccgagatcgttggcctgcagatgccgaggagaacctagagcgcatgaagagcgccggtattccctacgagcgcaaggtgcctaagtgcctgaactgtggaggtaagtgtttactttgaagattccttataatattgctaaattctgtttagagttgggacatatctcccgcagttgcaaggaggagcgcgccgagggcaatgatcgtgtggaaatcaagtgctcaaactgtgagggagctggacaccgcgtacgcgattgcagacagcagcgcaagcacaagcatggttgccgtaactgcgggtatgtggctgtggtgcaaacaacgaactggataatgctgacttttatgaagatctattgagcatattgcttctgactgcaccgagccccgatctgcggctggtgttgaatgccggagatgcaacgaaagtaagaccttgcccaagatgattcaaatatttcatgatgctaatgtatctatttcagctggccactttgccaaagattgccccactgttgctgaccgtggccctcgcacctgccgcaattgcgggtatgttaaaatatcatagcccctgcgattgtcgctgattctaacatcaatacagatccgaagaccacatcgctcgcgattgtgatcaacctcgtgacgtttccactgttacctgccgcaactgcgaaaagagtaagtgcgatgcatgccccaaagattcctggaaacacaactgacaactgctattttagccggacattactctcgtgattgtgatcagccgaaagattggtcgaaggttcagtgcaagaactgcggagaaagtgagttgatacatgcgtttttaatactgagttagtccgctaacaatccttagtgggtcacactgttgtccgttgccgccagccgcctaaggaggaagagcctcaagacgaacctactttctcccccggctctcccaagcgcgaggaacctgatccgctgaactcagaggctactgaccaacagtttgaatacaagcgccatgacgacgaggacctctggtaaaagacacaattctatgccagaatggggtgactggaaagctctaaaaacaatagcgatttggtttccctttatgccctgttatgatcggccccgtatgagagttgtcgggtgttgactgttcttgggatgcttcacggtggcctaagatggacaagaatctgatgttacatatggggtctatctttgctgctctctttttttcaaatctcgcgatgtgttttgatgtttgccaggatttcacccatgagtttacgatgattgctgaccggccgatggtcccaaaggaggatatctgttaagacttttcatgctctgttgagctcgatttgatttgacgcgcctccggatgaatctgaggatggagggtctgggcaggaggctctgatctggggacatttctgacgtgcattgttatctgacaagttcaatttcaagggaacatccatttagtgcattcttcttgactcattgtagactgcctagtaagatcgtttgaagttgaatgctacaggagtaagtgaatgacggcaccagctgtaaagtgaaccggaaaaaaacaaaaccttgcgcaataattccgactcgtatcatactcggagttcctcagttcggatcaaattcccgaggtcggctttacttggagtgccctatgccatgatttccgatgtcaaaccacattaaccttcgaagcaaattcccgtcgatcattgactgttacctcctagtcgatcgtcgttttactacagcacgttgttaggagttgtatttaccacgtcattaccgggttgatgtatcgtaggccgaatccgggattccggtgccctaactggctcactctatctacttggattagcaagttttggcttttcttggaatattgtgttgaatagttaataaagattactattgtcactctatttacttaacattttaaagtgatcgactgcataattgggtagtatcacgtaaatacagagttgcagttaggcatatccgaatcgggcatcccgtactctcggctaccccgtgattcggcctgtgccgagctatagatttttgtgtgacaaagaggaaggactctgaaatccacatgcgtaggatcaaaccacctacctattttggacattgtaaattcacctacctcgcctagtagttgggtgctaattgccgatgatgtcattaccggcttcggctatagccggtttgacgagcaggtttttcgggacctgaggccggtccgatgtgaggctaacacggaaagttcgtgaccccttgtcaccatccctgccaagtgtgcttggcgagtcaacggtgaagagaagataaaaatcgagtagtgagcgcaaggtaggaagcagtaattgcgcgcagtggtttgagcccaatttcgtgtccacagcaatatgtcttgtgcacatacgcccgtagtcctttcagcggcgatcagcggagaaaaaaaaatggggagtccgggggaactggagaatctccaggtttccgtcaaatgcaaccccaattgagtcccaacaatgtcaaaagtaccccgaaccacgcgagagcctgtgaaccgtgcagctgtcatacacttcatatcatcgacggaaacagaccgtccatgagtccatcggtgctgtcgagggctagaactgatgcaatcacaaatattaccgtattaagacagtactgtcaccgataccggacggagaccgacttgggccaccnnnnnnnnnnnnnnnnnnnnnnnnnnnnnnnnnnnnnnnnnnnnnnnnnnnnnnnnnnnnnnnnnnnnnnnnnnnnnnnnnnnnnnnnnnnnnnnnnnnnnnnnnnnnnnnnnnnnnnnnnnnnnnnnnnnnnnnnnnnnnnnnnnnnnnnnnnnnnnnnnnnnnnnnnnnnnnnnnnnnnnnnnnnnnnacttggccatgcgagggggctcgcatggccaactacgtgctcctcctgacgccgaattgccaggtggatcctttcgaaacctggaggcataccgatgatcacccactctctcgtctcggctgtcaagatgtggtatagtggctcgctcccccccgatcaggccatggtgtaggcatcgccaatgcaacgttgctactgcttctcattggcggcttgtctcttgctggttctgacttgatattagatgtggatactccccttgtttgactgcgaagttcataacctgactggtttccccggacctggctgtttcgttgttgaatctccttttctctgcctagctgcagtctgtccatttcaaatccattgaccccggcgaatagtcttccattctaggaattgactataagtctgtctttcttctgtaccctacaacctatacaccatatccgccatcatgaaaccatactttggccttcggggcacgaacctgaatatcatgatcggtgttattgccggtcttgatttcttgtatgttggtctttccattatctacttttgaagtatcactaacgcgaattacacaggctatttggatatgaccagtatgtcatcgcgaactgaacgtgcgaagtcttgtggtccttgtgctaacactcaacagaggtgttatgggaggtctattgacattgaactcatttgttaaggtcttccctgaaatcgacaccactaaatcgagttcatcgacgggcagcaacgcgactacacagggtatgcaattcatgacatctctcaattcattcatatactaattccgcaggaataaccatcgcttcttataacttgggctgtttctgcggtgcaatcctctgtatctggattggaaactaccttggccgtcgtaagaccatcttcgccggctctatcatcatggtgatcggggctacgctacagtcctgtgcttactcgctgccgcatctcgttgtcggccgtattgttactggtatcggtaacggcatgaatacctctaccgttcctacatggcagtctggtaaggagtcagctctgttgagaggagcccgatgctaatattacctagaatgctccaaggcccaccaccgcggaaaactcgtcatgctagagggttccttgattgctgctggaatcatgatcagttactggcttgactttggtttctccttccttgatcctagctccgttgcgtggcgcttcccaattgccttccagaacgtcttcgcattggtcatcttactcttcgttctaccactccccgaatcccctcgctggctcatcctgaagggccgcgaacaggaagctttgcaggttctctccgcgatcctcgatttggatgagaacgatgcctacgtacactcggagttctctgccattaaggatgccgtcctggctgcctcaagtgtcagcttccgtgacttgctcaccatggatgagaaccgccacttccaccgtgttgtactcgcctacgttaaccagatgttccagcagatctctggtattaacctgatcacctactacgctgctactatttatgagaactcacttggaatggatggcctgacatcgcgcattctcgccgcctgcaacggcactgaatatttcttggcgtctttggtccctatcttcattattgagaagatgggccgaagaatcatgatgttgatcggtgcggctggtatgtcgatttcaatggctgttttggctattaccactagctttgagggccagtccaagcctggtattgccgctgctgtattcctgttcgtcttcaatacattctttgcctttggctggctgggaatgacctggctatatcccgctgagattgtaaggctctcatctcttttattcctttacactaaaacaccactaacaacgcgataggtgcctctacgaatccgtgctcctgccaacgcactcgcaacctcgggcaactggatcttcaacttcatggtcgtcatggtcacgcctgtggcattcgacacaatcaagtacaagacatatattatctttgctgtcatgtgagtatattctgcgcggaatgcattagtgcacgactaactcggctcctattagcaatgcgttcatcttccccgtcgtctacttcttctaccctgaaactgcctatcgatccctggaggagatggacacaatcttccataagacatccaacgtcttcaatgtcgtctcggtcgcccggaacgaaccccaccgttacggaaagaacggcgagcttctcatcaactacgaggacaccgcggagcacctgcgtcgtgctagctatgtctcagagaagaagattaagctggctagtgggatggatgatatggagtctggaaagggtacccatgttgagcaccgccaggacagctcgtctgattaaattttagagaaggcattcttcttatgttaattatttacaatgataatcaacgattcacgattcggtgcatcaaatatttcatataaccctcatgtaggtcaaaaggtatcaacgacagaactcagccacaaatgccccattcaacctcacgctgaatcacaacgtgccatggccgctcacagcccaaaggccaatccaccaatcgcagcagctaggacagcagccaggatgccagtcccactgacacccacacttgctgcagaacctactttcatgattggaccagctgcaacccctccatctgttgaaccagacgaggtagtagccgtagcagtgacagccgaccacaacgtgacaggctctgtcgagctcttaagggaagtcgccgagaaaggagtcgtgaacgagtaacgagacgacttgctgctaagcgaagacgtcgcctcggcactgtttgtcgcataaacagaccagactgtgtaagtactcgtagttgtagaagtgaccgtctgaacagtgtatggggaataagaagtccagtaatagaaccaataagtcctatactacaatcagcaaagcatccacaaaccaaaaaccaacataatcagaccacataccagtagacagtcgtataataataatcccaatcaaccgcaacataacccgcagtagcagtagtagtagcagtagcagtctcaacctccgtcgccgtaagcgtagccccagccgcaaccccatcatactccccagcacaacccgtcagcgcacagcaaaccttctctcccctgtagatccgacacgtcctcccgacccgacagtagtaacccccggaacagcactgcgcaccgagcggcgcacaccccgtcgtcccgcagcacttatacccgagcggacacgtcccgccaccagcgcagcacgtgtcgcctatcgaggcacagtacccgttcccgcagcacttcccgccgatccgacagcagcggcttgtgtcgtatgcgcattcgctgtacccgattttgcattccagggcgcgtgtattcagggttgagttctcgccggagaggactaggggaagggagaagatatcatctgcatcgaaggagatggagatgttggagaggagttggggctcgtcttgatcggtgggtgtgctggctgctatgttggcaaggaggagggatagggctaggcatgtaaaggaagggaagaagattggggagagcatcttggagaaagaaagcttggtggcttggttatggtgtactgctctgttggaaatgtcggggtggaactgcgattttaagtcgcttcccctgggcactgcctacatcaatgcggctggataaaagataaatatgcccaagcgagcatgtttaagattgttgttcgtattcacgggaatttttgggccatattacctataagggttgggttgttatgtttgcaaatacgaggtgtgtcgcttggcgcgggctcgagccgctttttcttggttgatttacggggtgctcgctgtatgggaccgagaagaggggagccgaaactgcgctagatagtttggcttgctcctaggcttttttctcgttgataacgttgatgtaaaggtctggaggtgttcttggctttagggcttagcgatcctcgtgatagtgctccatttggttaggtcagattctcatgcagtgtttctttgtcaagatgagaatcagactagcaattgatttggtttgtattcgattccgagaaacacacggtcttgttgtagagttcgagctctatccttggacagggtcgacgttgtgaagaggaggacatctccgtggaaagaagtatcaagactcctaatcctagtgcaccatatcatttgtcacatatggaacctcaagaagagttggtatctctaggaatagcatagtctaaaacatgcgttagcaggagacaacgaacatgaggaacagctgaagtgaaggaaacaaaacaaacaggtcttgattcagtccaggcctaaatcaggcattaaggcattattatttactcaaaatggggttttggcccctggcgtcggactacatatgcacactatgattgtgacacaagacctggctctatttcttgcgcatgtcagctcactacacaactatctctcttttcagattcaaggctatttgcaataagccaaagcttcatcttttgcctgtacccgagccctaccatgacccgatttgagtattttcgatagaccacgtgatggtcccgagaccggcgatcaagatgttgatcataatgagaatacataaaagactttgaattgcgaaagtagttctgagtcatttcgtgggatgctgttttgactggacatgattcaatggtatgtccatagcattctgaaagctagcagctaacagcttacagctccgcaagtcaaagcagaaaaattcaaatgttatagtccaagatatagaacggaccaagacccataggaggtgaggatagcctcgggagaaaaagatttaaggttatcctcggtgaagagctcgttgggaaaaaaaaccgaaggatcttccctcaacctcaacctcaacctcaatcttgaaaatctcaacctcaccggagatttgaattccatctcggatgttcaagtctatgagtcacgcgattcgtgcataagactataagacttccttaatatcggggacttttaaggatcttattgaggggtctttttctccgccaagatccacccctctctttatcagatccgaaaacggagtattttttcgagatccaagtcaacgtatgtttatacctctctgacctcagggaagatagcctgtgtccaggaggaattgaactatacaaaatgaacagccattgactcacaattcacagaaatccatctagttgatatcccgggccattggcgtccttcaattggcattgcttttagcggctatttgcccgcaaagaggctgaataaagattctatacacatataatattaataagacgacaagatgtccaccaaagatcaacatgcctctgtcagcattgacaagcaacctatctctgaggatatttccgagcagccagagcctcaaagccaggtatcctcagacgacgtcgactccttggaccatagcgtggccaacatcgaacgaatctacaggtaaatcgcctacccgaaagacaatccaacttcagaacctaacatccacagaaaactggaccgtcgcatcatctccgcattttgggtcctctacttcctttgttcagccatccggtcgaacgtaggcctagcacagacaatgaacacagactctggccacgacctcgcaagtgtgctccacctaacccgacacgagatctcaaccggtctcgccctcttctacgtctgctacgtggtcttcgacctcccgtcgaacctaatcatgacccgtctaagcccccacgtctggatgagccgcatcgtggtcagcgtaggcctaattggaagctgtctcgccgctatgaaggcagcctggagcttttagtatgttcaattctcccgcaccatcccaattcatcccacatcatgtatctaacaaacctagcctcctccgcctcctcctcggcatcgtcacagcaggcatgtggccaggcatgacatactacctaaccctcttctacccaccctcccgcatcggaaaacgcatcggacaatacttcacagcctcgcaagtctccgccgccgtcgtcggactcgtctcagccgggttccaaaaaatggacggcgcccacggcctcgtcggcttccagtggatgttcctcgtctacggcgtcatcaccgtcgccctgggcttcggcctgctctggtggttaccggacagacccacggcgccgggcgagtcagcgccgaaacgcacctggatcatgcgctgggtgcctgctaccgcgccggcgctgaaaggcgctgacgccgtcgtgcactaccatgacctgaagcgcgtgtatcactcgtcggcatggacgctgcgggatctgctcgcggtgtttttggattggagactgtatccgctgctgattatgtactttggtgttgtgggtgttgggattggcgtgcagttgtatgcgaacttgattatcaaggctattgatccgactttgagtgatgtttcgttgagtttgttgacggctccgatttggattgtaggtttcccccctcttcttatcctttcctcctttctttccgtccaagatccatccgctaacacatctatagatggacctcatagccatcctcctcgtaacccccctctcagaccgcttccaccgccaccgtgcaatcttcttctccatccccgtcctgctccaaattctcggcctcctcctaacaacctacgcgggcacagacgccaacccgtggccacggtacggcggcctcctaatcgtcggattcggactaggcccaacagtcccgataaccatgacgtggacgacggagatcttccagccgcgacacggcgaggtcggcgtagccgctgcgtcggctgttgtctccggactcgggaatctgggcagtatcctcacgacgtatgcgctgtattcgggctggaagagtgactacgaggcgcctgggcgtgagaagtataggaagagtaacctggtcatgattgggattctcggggcgagtattgtctctgccgggttcatggaggttatgttgcgctttgtggatgggaggtatcggggtggtgatgatgagggggcggttgatggggctgccaggcgggaggtgcggcagcgggggttgcatgggttgggggccggggttacgcgttggttgaggatggggaggtgatcggtagacttgtgtgtggccgtggtgcaacggtgaaaatgttggcatatttctctagattttctgcttgcgtggacttttatagaactatagaagggaatgaatacgatctactttatagatggagaatacctgcttcgttcatccagatccatgcttctacaaagttggtcgtgctcggctatttgatcctgtcatatactccatgctctataaaggggaagaagcttccgttggatgctggagtgatactagattgagttcaagatccttccatgtgagatcgaaatactccgaggtctgattaagattagaccaatgaaaaaggaatacgaaaagtacaagagcagcaattcggcgtaagcgcaaaacaaagttgaggtcagtaacaattgaacttggtattaattgtcgattctccagaggaacgatatcagtatgatatctctcgataaacgatggtgtggtttccccatccatgaatattctatgctattgtacgtgtcacattaccctgtgaagggaagtcgagagaaacagaaaaaaataagtgcggctggtgcaacgagggagggccagcaggaacgcataggcggacactggaaccgggagaaagaaagggatagaacgagaagaaagacaggaagaggaagagagaaaaggcagatcacagaacatctatgggggctccctcacgcagtcaagccgctctggtccgactcccaggttgacgccgagggtatcggagcgctaagaccaaatgattccaatccatttagatgccaccacacatagtctcaacgatgataccggtaatctggtagggatcagcgttggaagcggggcgacgatcctcaaagtaacccttgccgtccttggcgcactggcgggggatacggatggagccaccacggtcggcaacaccgtaagagaacttgtcgatgctgccggtctcgtggcgaccggtgagacgctcctcgttaccctcaccgtagacggcgatgtgctcaacgtggcgggcctcgaacttcttcatgacggcctcaataaccttcataccaccatcggcacgagtggcgttggtggagacgttggagtgaagaccggcaccgttccactcacccttgatgggcttggggtcgaaggagatgcggacaccaaactcttcagcgacacggtggagaaggaaacgggacatccagaggtgatcacccactaaattaacagttagtctcagatattcattgcagtccgggattgcgaaacttactatcgatgccagggcaggggccaacctggtactcccactgggaaggcatgacctcggcgttgataccagagatgttgataccggcgtacaggcaggcacggtagtgagcctcgacgatatcacggcagtagaccttgccggtaccgacaccgcagtagtaaggaccctgggcaccggggaaaccgccacggggccagccgtagggccacccatcggtaccgaggagagtgtactcctgctccagaccgaaccagaagccctcgctggcgtgagcctccatcagacggttggcatcatgacggtagttgaacttgttggggcttccatcggcatcccaggtctcgcagaggacaaggatgttgtcaccctggcggaaggggtcggggtagtaagcgacggggcgaaggtagacatcggagttgtcaccgggggcctggttggtggaggaaccgtcaaagttccactcagggagctcatcaacactcgtgacgggcttaaagagagtctgttggattcccgttagtgagttgttcgagggagcgcgatctcacgtgacggcgggtggctgcgtcgcatagatcaagaatccccgtgcaccatatccgtgcacagggcttatcacagccgggaggggattccagataagaacacgcagcaaccacgcgccgacagtccaccatgtgtagccagagaaaacgtgggaattgagatgagtcataccttcgtcttggagcgagtgccaccgttggagtcaatccaaacgtattcagcttgaacgcgtccacgctggtcaaggttcatgtatttcatgagctgtttcagtcagtatatgtcattcctcactggctcgaaggccattgtggaaatccaaaatcaagaatcaaacgcacattccccgtgttggagacgacagttgcagattcggacgcctgagaagaagcggtcagcattggttctacacgcacaagagagagggatgactcgtaccatagtgaatatgggtatgtgtgatgttttaacaggttttcaagcaatcaagcaatgacttttgtagagaagagtcccgaaggaaggaaaacacgaagggacctcaagaatagaaagcgaattggatatggatgggagaatccagaggagagaatgagttttaaagatgtggaggggcaagggagggatgataacctttgggaaaaaaaaaggaatttaaatttagtcactgactttctcttttgggaatttctttttttatttcttttgtttttttcttggcaaaatcaggaaggcgcggctcagccactacctaaaggggtcaagcgtggtatcatcgctgtaatggtctgtaaagcggtcgaccgatacggggtacagataaagtacctcatacatatttgtgcgcgtcggcaaagcctttcctgaaacgttggggaattaaaaaaaaaaaaaagccctcactctattttagtgcttctccgttctccgttctccgtcccgtcagtattctccagttatttcaatataccatttttaatgcctcaatatcaaaatagatcgtctacaatgtcacaaggacctcttagtttttcttagtttttcttcagccgagcggaacgccgtagcctgtgaagttgcaacttttcaccgagattcaacgccactcattaacttccgtgtcatcatcgtcgcatcatccagacaccccccc

SEQ ID NO: 14 - DNA, 296418 bp, Penicillium roqueforti
  misc_feature (113)..(1575): n is a, c, g, or t
  misc_feature (13292)..(13456): n is a, c, g, or t
  misc_feature (30858)..(31005): n is a, c, g, or t
  misc_feature (105358)..(105501): n is a, c, g, or t
  misc_feature (186905)..(186912): n is a, c, g, or t
  misc_feature (220820)..(221065): n is a, c, g, or t
  misc_feature (242007)..(242251): n is a, c, g, or t
  misc_feature (276484)..(276702): n is a, c, g, or t
  misc_feature (282125)..(283825): n is a, c, g, or t
  misc_feature (288817)..(295103): n is a, c, g, or t
aagacaattaactcagaagatcaactcagagtattaactcggaagattaactcagagtattaactcagaggtttaactcagacaattaactcagaggtttaacttagaggatnnnnnnnnnnnnnnnnnnnnnnnnnnnnnnnnnnnnnnnnnnnnnnnnnnnnnnnnnnnnnnnnnnnnnnnnnnnnnnnnnnnnnnnnnnnnnnnnnnnnnnnnnnnnnnnnnnnnnnnnnnnnnnnnnnnnnnnnnnnnnnnnnnnnnnnnnnnnnnnnnnnnnnnnnnnnnnnnnnnnnnnnnnnnnnnnnnnnnnnnnnnnnnnnnnnnnnnnnnnnnnnnnnnnnnnnnnnnnnnnnnnnnnnnnnnnnnnnnnnnnnnnnnnnnnnnnnnnnnnnnnnnnnnnnnnnnnnnnnnnnnnnnnnnnnnnnnnnnnnnnnnnnnnnnnnnnnnnnnnnnnnnnnnnnnnnnnnnnnnnnnnnnnnnnnnnnnnnnnnnnnnnnnnnnnnnnnnnnnnnnnnnnnnnnnnnnnnnnnnnnnnnnnnnnnnnnnnnnnnnnnnnnnnnnnnnnnnnnnnnnnnnnnnnnnnnnnnnnnnnnnnnnnnnnnnnnnnnnnnnnnnnnnnnnnnnnnnnnnnnnnnnnnnnnnnnnnnnnnnnnnnnnnnnnnnnnnnnnnnnnnnnnnnnnnnnnnnnnnnnnnnnnnnnnnnnnnnnnnnnnnnnnnnnnnnnnnnnnnnnnnnnnnnnnnnnnnnnnnnnnnnnnnnnnnnnnnnnnnnnnnnnnnnnnnnnnnnnnnnnnnnnnnnnnnnnnnnnnnnnnnnnnnnnnnnnnnnnnnnnnnnnnnnnnnnnnnnnnnnnnnnnnnnnnnnnnnnnnnnnnnnnnnnnnnnnnnnnnnnnnnnnnnnnnnnnnnnnnnnnnnnnnnnnnnnnnnnnnnnnnnnnnnnnnnnnnnnnnnnnnnnnnnnnnnnnnnnnnnnnnnnnnnnnnnnnnnnnnnnnnnnnnnnnnnnnnnnnnnnnnnnnnnnnnnnnnnnnnnnnnnnnnnnnnnnnnnnnnnnnnnnnnnnnnnnnnnnnnnnnnnnnnnnnnnnnnnnnnnnnnnnnnnnnnnnnnnnnnnnnnnnnnnnnnnnnnnnnnnnnnnnnnnnnnnnnnnnnnnnnnnnnnnnnnnnnnnnnnnnnnnnnnnnnnnnnnnnnnnnnnnnnnnnnnnnnnnnnnnnnnnnnnnnnnnnnnnnnnnnnnnnnnnnnnnnnnnnnnnnnnnnnnnnnnnnnnnnnnnnnnnnnnnnnnnnnnnnnnnnnnnnnnnnnnnnnnnnnnnnnnnnnnnnnnnnnnnnnnnnnnnnnnnnnnnnnnnnnnnnnnnnnnnnnnnnnnnnnnnnnnnnnnnnnnnnnnnnnnnnnnnnnnnnnnnnnnnnnnnnnnnnnnnnnnnnnnnnnnnnnnnnnnnnnnnnnnnnnnnnnnnnnnnnnnnnnnnnnnnnnnnnnnnnnnnnnnnnnnnnnnnnnnnnnnnnnnnnnnnnnnnnnnnnnnnnnnnnnnnnnnnnnnnnnnnnnnnnnnnnnnnnnnnnnnnnnnnnnnnnnnnntagtaaattggatgcacaaatttaaggtccctactataagtactcaaaatttcaaagggttaaaatacagttaagaggtagttatggtgcgtacaaaatatggccgaattaggttagtgtcattcttcccgtagccctaaacctcaaagatataccttaactttaaccacgaatttcagacgctacactagctggatacgaaagataagatatgatctagaatgcttaagaaaagggctttctagtgatactaaaataatagtaaatactcattattttatatgtacttaggctctatgatttcctatatagaaacgtctagctagcgcggcacccaggctactagcccattcaacccaaacgcgattgaagaaactgtttaatagtgctaggtataccaaatcctgtttctagcacgggtagatatcaatttatgtccgcgatccccggataccggacataataggcctgccagtcatcaatctcagtcatcttgtggaatcccggaagctgcacaatacgccagcgtatgttcatccagcccacgtcatcctcagtacacccttcaaggggctcgaactcctcaggctctgatatatcctcgtcctcagagtcctcttcaggcacatctgtccatttccattcagcattaaccatgcggacatgccctaattcatattcttcgaaccctcccaagggggtgtttagaacggactccatagcctcctggtccacggtgatgaagaagcggtatcggccgctcgttggagtatagtcttcgcttacgccctgttcctcttttaatgcagtcttcttccactgatagaagtgctcgcgtagggtggcaaccgtggcaccctcaaaggaggggtcttccaagaccgttggggcgaatgtgtcgaggagatcaaggccactgtattccttaaggtcttctgagacggcgccgaccatgcgagccatgaagttctcccagtcagagtcattgtggtacgtgcaacgaaagatcacgaagccccaggttgtgaatccatcctccttgagaagtccctcgaccagatcagccccattcataaaggaatacattgtgggatcgcgctttgagcgagaggccattgtggtggatgttgagagactcctgattgtgttgaaatgtgatgtagataaggactttgcgagacgtgagggaggttcgaagggaaagcgaaagaaggtcgggcgggtaacgcttgggcgggcgaattggctgtagatcggtagatggcgtgtagtttgaagtatcctcctagtagtcatgagtgcgaaggcaggccttggttctgttgagatgaggataagtaggggaaagaggtgggggctagggggtatggtccaggggcaagcaggatctctcaagtttgcagagatttaaagtggagatgcgagtataccctcaaacgctttaaattgcttaaatctcaggttcccaggatgatgaaacactacgcccgtctgggcaaggggagaagtgatcggagcctcggagggccggccggggaagggattcgcgggtccgtgttatcgggcggctcggaataagttcgatacgcgcgctatggtcataaatcaagagcaatttcttctaccgtggatactctgaccatttagtcgcaattttacccacaagactgggcagttgcaccttggcatgatgtcttatcgacttacaccacactaacttcatacatacgcatctatgaagaaacccccacacacaccgagtacccgactcctagatactcacagtccgatccaatcgcaggattccacttgtatagttcagcaaaagtaataccatacgcggtctcgatcttggcgcacgaatcgttcgacaccaccgtgtaatactggttgcagttcgacgcgattcccgtctgagtgggtgcacttgctgttgcgctggtcgtcgatgccggtcccttgacacagtatgcttctcctagccacaaattggtacaagtagagccaacactggggttccactgatagaattgagcaagggtgatgctgaacttggtctcgactgtggcacagtcgtcgccctttgtagtggtgtagaacttctcgcatcccgacacagtgtcggttggagtgggccccatggaagaggaggaggaggtggtggtgggggtttgggtggcagttccactggctgtagtcgttgcagctgcagacccgacaccaatacagatggcgcggtcatccgtggcatttaggctggcatagagcgcagtgtcacagtctccttccagccagctgttccaggacacaaggtcgtccatggtcaggctgtaatcgtaaatgatgtcgtcgcaggtgtatactagcatttgattagtaatagcacgattggggagggtcaaatcataccgtcagagtaagacaggtcgacggaggtgaagcaattgcagttgaatgccgttccagcctccgtagcattcatgggaaggcagagcccactatcagtatcctccgttgctacatctgcgtcagcctaatctatttgttcgagccagcggtacttacaggcagtgctgttttcataccgcaggatgcagtagctgttttccttgttgagctcacaggtgcttgcgttgttcacaagacttggattccaagtgaccatttgtttcattgtaatgccccaaaatgtcgccatcgccacacactcagaagtatagttggaaggattttcgtagtcatagcagtctgggatagtgcccgaagcggtgggaaggagcgccgctcccgtatacacatagccaggatcgcttgtggccgtaggtatgtcagtattcacgttggtgaagttgacgggcgtgacggtgatgggcaatactccagtcaccgtgtagtttgcgtagctggtgattgaaccaacggccttaacacagtatgcctcgtcaagcaggaggtttgtgcagtttgcgtcgatttctgggttcaggaagtagaagtcggtaagggagatagaatgggcgagagagaccttggcacattcatcgcctttttgaacctagtagaaatgagcaaagacccaacttggatggaaggatcactcaccgtataccactggctgcagttgcggttgctattgtccatagcatttgttgggaccgctgcaatgccagtggctactccagtttcggttgcgcttgagtcggatccaccagcagtctgattcaagtagccactcgggggactgtaaaggtcaatattccgtgactctcaaattgagattgaagcgaaatctactcacctcacacacacctcatatccaatgaagaaaatcgcattcagacagagggaattgatattggggttccaggagaagaactgcggaagagtcacattcgcgaggccgccgacgacactatcgcaagtgtcatcagcctgccaggtgtgtgtggtgcactgcgaggggacacagagtgtctggttgactttcgccgcaaagttttgacagtagagatccaagtcgttggtttgcagtaggtagtatgtagagactcccagcgactttgccacggagttacagtcgtctgtttccttcacctgataatagttttcgcagctggttgttgccgagctggttgcaggcgagctggttgcagtcgcagttgcattaagcgcgtacgcagttggggaagtgactgagtaacccgtggcgctgcagctcgacgtcaaagaagtgaagctgtccgccacgccctcatcataccctaaggggctgtttaattgagtctctaatgtccccagccaacaatccgagcaagaaccattaacaggccaagacccgttggaccaggagagcaattgcgggtcacagtaacccccggacctaatgatggtcagaatcgataatcattggcagaatcaccactcactcatctttccgacaagatatgtcataggtcaacatgtacttgtcagcgataaatgtagctggataagctacatcctcaacgacgatcacatcggtggtctctgagcaggccgccttgatggttgctctggcgcttttcaaagaactatagcaggtgtcgacgcaaagttcatcgacttgatcaccatccagaagagagttgctgtttaaatcagctttgagcccgcaatttatgaatcagacctactctggggacacaacgggcagaaatgccggacaggacacattagtcgacaaggcttctttgcaaccatcggtgagaccaggatagcttgtgaatcctcgaatgccagcaggctgctgggcaagggccgtggaaattagtagagcccacggggcagtccacatcccacgcatctttgagcaatgtagtaatcaccactcaagataatgaattggtgagactgcaaccactagatagcctggtatacaagtattccagagctcaattcacaaggaagagagaagaaaagtggaaaaatgatgttgggacttcgctgagtagttccatatgcagagcaattttatcattctgcatctagacaaagtatatggctcgttcagcactggcccccaagggtacaatcgtttccacatccacttcacttccaatcgggcatatcccggacgggtctcacgaggattttgagattactgcggagctcaagggctgccgcttggttagactagaatcaagcatgcaggcgaagacttagcgatcacttgaaacatgagaaattttctttggatcgagtttagcgagggattccaagctacggagtacgcgaagagtacctcagtggcttgatgcggatccttcggccgcgtaccgtgggctcgactagtagtccctagtagtccctggcttagcgtcggttcacctactcatcctgtctgaaccgggggccaaatggtgggtcgtaaaattaaatcaaaccgcgcgtgcagtagatcgatttcacgctccgtagttgagagtatggtcagtggccttgacgaagatttgaatttttgaatttttggatgggatcttttgataccgccaatccgagtagtatttggctttctataatcaggctgatttgtagaagcctagaatagcagaatatttatcgcaacaccaatataagatacttttcacaaactccggatcgctcggttgatccaccagcttcagttaattaatacctcattatcagtgccggtggtttcatccatttttcggatacctagacgtggtggggctttatgtaggatacctagtgtagagctgaaaccacccggtgtagacccacatggcgtatctgcaagcatgctggaacaatgcacttagcgtatactgcccaaaggccttctttgcagggctatctacatttcctgtaaaaggagggatttctccaagtccagtgtatcaatgctcagtctattttgaccctgttcgttctttccatcatcctttccttcatttctcttgcatgagattgccttgagcaagccaatctgctgcaatggctactggtcaagctttcaaaaaggagcacttctttcgtgttctctttggcattgtgcttggcttattgtgtctggtcttctggccgcacagcttgaaactgtctggctctagtattgctcgccgcgcttccactgttgacagcttagaagtcaataaccacgtttccatctctgcccgagatgattactcctgcagtgctagcaatccctgcagcaatggagcttgctgcggtgccagtggctactgtggctacggtgatacatactgtggcaaggggtgtgtctcaaactgcgatgctattgcagagtgcggaaagtacacgcagcctgcgaacaagacatgcccactcaacacttgctgtagcgaatttggatttgtgggttgctatttcataagttagacgaacacggttaacctctattagtgcgggacaacgaaagacttctgcaatggtatgtccttcagttcctgatctcaaccagagactgacgactagaagatgcttgccagagcaactgtcatctgaatgtcactgtcccggcaggtggatcctcaagcggtgtactgcaaaacaaggtcatcggctattacgaggcatggatggctcgtaagagctgccacaaaatcaagccggtcaacttgccattggatgcactgactcagtgagccctattgctttcctaaccagtcatgcccatgctgacattgagcagtgtaaactttgcatttgcatcgattgatccttccacatatcaggtcgttgcgatggactcggcaactccgacaagtctcttctcagatgtgaccaacctcaagtctgtgaaggaagatatcaaggtctatgtcagcattggagggtggactttctctgataacggcaccgacacacagcccgtgttcggagatatcgctgcatccacgagcaatcgcaaaaagttcgccaataatgtggtacacttcatgcgtcaatacggtatcttcacttatttgtttgtttgtcttatctaatctttaacagggtttgacggtgtcgatcttgattgggaatatcctggtgctggtgaccgaggtggcaaggccagagacacagaaaactacgtcctcttgctcaagaccctcaaagaggttttcgatgatagcggaaacaagtatgggctgaccttcacagccccttcgtcatactggtatcttcgatggtttgatctcccaaaaatggtcaagtacgcggattggattaatatcatgacatacgatcttcatggagtgtgggatgcctccaatccgattggaagtattttgcagggacatactaatctgactgagatcaagagtgccctcgatcttttttggagggttgaggtccctccctcgaaagtggtcctgggtcttggattttacggtcgtgcgttcacccttcaagataaggaatgttcaaagcccggttgtgcattcaagggtgcctcgggccctgggtcctgctcggatacagctggtatgctcgcgtactatgagattgccagcattctgcagggaacctcgaagaaacgagccaccatctccccagtccacgataaggaggctgcagtcaactatttcacctttgatgacaatcagtgggtttcatacgatgacaagactacattcaagcaaaaggtctcctgggcggatgaagtcgggctgggaggggcaatgatctgggcatctgacttgggtatgattttgcttgctctgagcgaatttacactaactattcattagacaccgataaatacgatgcccatacagacctcattgatcgagaaatcatatcgacatcaacactcaagcttgagaacaaggcaaaggcaaatcccgggacaaccgtcgaagatttgtctgcgttcacagggcagaaatgcttcaagcacacagggaaatgtctcaaaattgacgatacaaaagccatgtccaaagcatgtggcagcggctatactgttgtcggctgggacgacgcagggtgcggaaagtccaactgcgtaagtgaaccatctatgctcggtcaattcatgtctcacgattctgtcttcatcagcattgcggaaagccgatttgttgcccaactggtgccgccccgaagaactgcatgtggcgtggacaggatactggccaaaagggagctagttctgactgcagcgggcaatgtgccgcgggagaaatcaacgttgccggcattcgctcttcttggggtggcgggtatctcaacgataaaaacacgggcaagtgcggtcgtggctataaggcattctgctgtccagaccctgactacaagcaagttaccaagacttgctcttgggccaagtggtgcgtaccaactcaagtcaattgactatgcaccaactgacttttttacacctccagtggggagaactgcccacccagaaaatctgctgttctaacaaagtatgacgaatgttattccaaaggacgaaagtattgttgttccgatccagcggagctggtcagttgccaatgggagaatggaagcggcggtgacggcgattgcgcgaatgccgtgtgcaattcaactcaagttgagatcgccaagtctaccttaggtgatggcagtacctcttgtgaatgtaagtttgtctactttcaatctctcgttttgctttctgtatagtggcctaacaaggatctgattagggggccgacaacggtcaggatgctgtacagtgacgaaggcgccaacccgcaaggcaacctgcacttacaacatctgcgacttggattccgactattgctattccgatccgcttctttataagagagacgatcaagacaccccagactccgattacagtggtgacgactccagcatcgccaaacgtgctggtagagaacgcaagacattcaaaattgtacttgggacattcagctactggatcgcgggctatccaagcattggcaagctcttaaatccggaaaaatacggagctgctttactcacaaaggctttccgaacgcggagcggcttttgcgcaggctctacgctggatatcgtcaacttgccgaaaaatcctactgaaaagcaacgaaaagatcttgacacagagcatccgcttgacaaggggttgcagggacttttctacaagtacatggggaatcgagagctcccaggcgatagatccgccaatttcccaaagattgatcccaagttctgggacaaattcaatgagcccaatgcaaaactaggtgccatggctcaattcggcaaggaccgcaagggaaaaaagccgatgtccccggcagagtatttggccgaagcttatgggtccgaaaggaacccacggcccttcatgccggttgaaaatggcctgaatattgccaaaagagatattttcttgggcaaatctccggtccaagctacaaagctcaggaaagctgcaacgtccgctgtcaaagcggacacagatacagcggcagacaagatgctttcgttgcttcaaactgtaagtggctatggctttgttctggatttcacgcaagctaacccaggtttctaggccttttcctcctttgaatatattcgaaatgagatgtttctggagagattcgacggagtgatcgatgatacattcacagcttggagtaatatcgagcaggcgactgagacgtataacctgcagaattggcacgggttggtcttggatgctcagttcacgtatgccctggatcaggcacgtcgctgggcacgggaatcaattcgaattgccagggctccgtatgtcgaagcatatgaggccggtcgcagcttggccacttatgatcgtgtgatgactgccttggatcagtttgaggatcttatctcgcagattaagatgccggatgttacttccgaggactacaagaagcggaatccctataatggtgaggggccaagtggatctaactcatgatttagaaccttgaaaatttacgattccaattcaatgatcagccttaccgagtcttccagcgatgcatcttcactctggtctttcggagagctatgttggtctgggatcgatcgatatatactgcgtatgacggaaagtgggtttccctgccgagcttcgtctttcccaaagaggaaaaggtgcctcaagatgattattttcaaaatctcccagcgagatggtgaggctcgggagcttgaatgtcgtaactgatggcaaatataatcagctttgtagtcttaaagcagttgaagtgtctgaggctggtagggtaccgaaggcgcagcagcaatgtatggtagaatcgatgattgtaggagacaagagagaaaaagagagagaagctgtcgaaatctaaactacgcgggagccaaacggggagccaaacatagctataaccgaggaatctagggagagaggcaaaagcgggctgaattggctaaatctactactcattgcctagctggggaaaagaaggaagagagagagagagagctatatagtccggataatcacctaaccttccaatccaagaataaccaactagcctccgaatactgcgagagatgaaagggaaataaaagtaaaaaagtagctataaaacgaagtttacgtcggcgggggaaggagcatctccctacaattgcaatcgtcacgtcgccacctgttggctaagtgtcaaggtaatgtacgagttcttagagtaaaagactaggaataattgatttttcaatgaagtacaagtagtgatttaaggtgtgatgtttgtgggtctattgagccccggtaagtggggcctttgatggtctttaatgctattcctattagtgtactaccatagaagaaagcggtctatggtagaatcttagacttaagaagataatatatagttaaccctattaaaatatcttaaatccgcctatataataaagggctaatacctagtactaaagctaggcttagaacctatacttttataagtagacttcttagggagttcaatataaactattaaaaccttagcgcgatttagcctacctgagacatttatttccgagcctccgtaaaaaaaagaatatttggaaatgttcctccagaattaccccaaatgaaactcaaatcctcttatgtccgagtgctaccgctgatccagggatttgggcttatttcgggttcggctgtagcggccgagatttccgagtgcgtaaaaccaagtgtatcttcggagtcacctccgacccgaactcggagctcggcttagtggacaggccttttccatatgaatttgccgaggggtccaagtatacctgcctgccataagcccgaaacatagaaaaagacctgcaattgaaaagaatgatggattaaagcattgtagcgtttctacgtctgcagtatcggtggagatactattcaacaagggccgagatttattaggcgtgagtagaaatagtttgaacgctgagaccatgcggcggttaatgttgttacgaggtatacagtccactgccactagtagcagacctctattatccaaataaaatagtgtgccatcctgagtggtgtgtgtgtctatctcgaatgatgacattatttaccagatgatcgacaaatagtatttcctacttggatagagaaccctcatttggacgggagataaaacaagatgtcggaattgtggatctatgtaattagataatccttaccctacaaacagaggagctactccggcaccgagtcaccgactacgaaggtgtatagtggccaacagtcggatgcctgattttaatggttttatcgcctaattgggactagctcttaccagttttagaccgcctttgacaccgctcaataccatcttttgtaagtacacatcgaagagacgaaactgttaccatggggtaattcaaatgccttctacctattttaattctcaaaactacattcaaatattcgccacgccggagccagaggatacggagagtttgaagtttatacggtcggtaggaatggggactttgtgttgaaatccaggcttggctttccaaccgttttgggccttggtgtcagttgcgctattagcttttctccgggaaagtgcgggactacggcgggtatgaatggctttaaatacaggagattcatatagttggagggccttaacgcctaggatcgatgagaaatagtattttggggggggggggggggggtatgcaaactttctttttccaatttttaaccnnnnnnnnnnnnnnnnnnnnnnnnnnnnnnnnnnnnnnnnnnnnnnnnnnnnnnnnnnnnnnnnnnnnnnnnnnnnnnnnnnnnnnnnnnnnnnnnnnnnnnnnnnnnnnnnnnnnnnnnnnnnnnnnnnnnnnnnnnnnnnnnnnnnnnnnnnnnnnnnnnnnnagatgggggggggggggggggggggggggggggggggtatgaatagcttcatgtttcaactttcaagctgttctcaatttggtactaggagatctgtcatagtaattcaggtattttaatttcctgccggtctaaaattggtaagagctagtcctaattaggctataaaaccattaaaatcaggcatccggctgttggccgctatacaccttcgtacaccgactctcttggcgccctatctagcatggacacgagcctctgtgaggcctgacggacaagccgacagttgcgagacaaattgttgaagatattcggggaatcaggaaagttcacgctctaacacggctctactaacactgcccagtaagcgtcacgtaacgagttatttcactttataactctccaatcttccaatttctttcacctcgcttactgatgggtcaatccgttattgctatgtttaagcaccaaggcctgtaatgcgaaattggatttctctatgcattcggactggcctcgctatggcaaatcttatcaatagataaataggtaggttgcattcttaactactaagatgctccttgaaccactcaagtgcttgcagaaacgcgctctgcatcgcgtatctcaccacggggctctcgtgatcgcctcgcaccgcaaagccatgcttgacaccaccatataggttcatttgccagggaaggttcaattcttttaagatagcctccgtctcctggcgcttctctgcgggaaatatggcatcaagctcggcggcagcaatggccagcgggccctttatgctttttaattcattcgcttcgacgtgcgatgggtgcgcagtgtacccaacgtcaatctttcccggaagtaggtgtcgaacgacatatttgccgccgaaacagtaccccacagctccgagtttctagtttatcctcagtaaatattgtcttcgacaactccaaaaatacgtaccttacaattaaagtttgtatgcatctctctgatgcaagtctcaacaataggatcgatatctatgggaagatgagcttttccttggggatggtattctcccattctccacttctgcatgtcgaattcgcctggtttgttcagcggtacagggtcaccgtgaaagaggtccggcatcataacaaaatagccattcgtcgcaaactggtcagcgatgagttgagcgtttgtgaaccggtggccaatgatgtccgtgagtctatccatcagatggtaagtaagcccagagtaatcggtatgaggccaaaatcgaggattatccgcacttacatcaggatcccattctccgttgacttgttaggagggtggctggtatagacctcgaatccatttagggttgtgatggtgcccagtggctttccataatgtttgcaccctcggtagcagcatgattgggatgggttggaagccattattggataaggaggcgagcactgaaggagtaatcgcacttttcgaatggatctttgccctcggctagcaattgcttttttgattcgagctttcactcaattcaggtgggaggtaccatttaaatattcacacagctagatttcccgatatcgttaatatgtccgaggctcgcacgaacgaaatgacaaagtttctttatcccgggtggtattttgcttcccggtgggaccctcagaaggcgatttgaaaatcataagcggaagcagctgttgggcctaaaaccctactttcggagttaaaagtatgagcattatcgaaccgaaattgttcggggatgaagataggtctctttgaatagtcgccgacgctggtaaaagtggggccgacggtttcccagggttcagataagtcggacttcgcttcccgaaccagccagcccgtttaaagccggaccgaacaacaagtcttccaaatggagcaagttcgtagacattaaatccggtgcagttgatatataattcaatatttgtccaacagatcaaacaggatcacttttttggatgacagcctcaaattttctaattgtgtggtatcgagtgacaatccaaatattttcgcaaacacccctcagcccatcttttgtttttgtctccaacttttcaggacggtggcccagtcggggcttgaagagatggcggcattgaaaaaagagctcgttactcccgataattggtcagaccgggatggtacgacccggtcgatactctccaaacttcgaatccggcacccagatcacgaagtggctcatacccaccgcctaggtcatttgaaaacggatagtgagcacctagtacagtttgacggatcgaacgatccatataaaccattgaactggagcttcaccaagaaaagcgtcaccaccgttctatacggctttatcacaatgggtaagttctcctcggttctttgattattatgttaggtaattgacatctctggcccttttttaggctctgcatgggctagctctgcgtaatttctatggatcttcctttttatctccatgctaacctaatgcagattctctcctgccatctcagacgttgataagcagtatcgaatctccaaggaagttggaaccctcggcgtttctttattcttgtttggagtcggactaggtcctctcttatgggccccctgttcggaagtttatggacgcaaagtcgcggttttagctccatacgcgattgctgtcgcactttcatttgccacagccgtctcgaaagatattcagtctatcatgattactcgtttcttcaccgggttttttggttccgcccctattacaaatgtgggtggtgttctggccgatatttggagttcacagagccgcgctattgcagtgacagtgtatgcactcaccctagtgtctgggacagtgattgcaccaattgtgggtggagcgattgaagtcacaaatcttgattggaggtggactgaatatgtaagtttgttccggtgtactcggcctaccaaaagcaatgtgttataactagatcgcagattactggaataattatggccctctcattaatattaggggccatcttcttggacgaaagttatccacctgtgctgttggtctacaagagccgccaacttcgtctacggtccggaaattgggcacttcacgcccaacatgaagaatgggatgtcactttaagcgagctatcaagcaaacatctggcacgaccatttcagttgttaatgacgccaatatgttttgctatcgctctatacgcctcttttgtctatggggttctctatctcagtttggcttcattcccgatcgagttccaagagctccgcggttggaatccgctagtcggggctttgccatttctaggtcttcttttcgggttcttccttggtgccgcagttaatataaccaaccagagattttacagtcaacgattccaagcgaacaacaatcgtcccgttcccgaagcccgactcccacctatgatgattggttcagtattttttgctgcgggcttgtttatattgggttggactagtgagccgcatatattctggtttggccccatctgcggtgctgtatcaacagggcttggcttcttcaccattttccaagccgcattgaattatctgattgacacattttctgaatactccgcgagtgctgttgcagtcaatactttcctacggagtatatttgccggctgttttccaatctttgcgaatgcgatgtttcataagctgggaacagcttgggcattcagtcttttgggatttgttgccgtcgctctcattccgattccatttgtattttatatatatggcccacagatcagagccagagacagatggtccaaaatatccgtttagcacctgatccgagaagtgaaattttaatccttgaaatagggtaaaagccgccatcatccatctgctgtagcgctcaactcatatcagcttcgagcgatgaacctgtcttgctcccaatcgctctcgtttactttgtcttgtcacaaaccaggtagattaccagaatggacaatgaaaaagtaaaggtctgatagaaaaagcgtgcggatatagtaaaatgtgcaacatagatatttgcataagcctccgcgagatggatcaactgtttgtcctataacggacgctgcagaattttgggttttccttagattgcaactagtttatgccaattgtttcacttgattactccttcccaagcttgcacgagacgagactttacttatttattttaggctgagcggtgagtaacctcggttgggacacctacccaaaaaaacaagtaaaatttcagaagcgccggaaacgccagtagcccaatttttcggagggatggagatcctacactaattccttctcgggtggactttcatggagttagagaaggtgagctaggcgagacaagctgagcgaatacaatccaaaccacgtgcaaagtagcatttctcagagcaatggtgacaacatccttgtggctagccagcatgtcattgaatttcgaaatgttttcacctctgattgtcaaagaaatgtaggcgccaaacgttgtacctcagcgttctaccgattttgagattatattatttccagttcttaacagactctgagttggaaattcaaaactttcagctcatgctggtattctgcggctacacgatgaacccagccaagaacctgacagacggcctgaagtcctttcttcaactttcgaacatcttttttgcttgtttgaaagtcatctatcacattgcgtggtgacaaaaagctctgcaaggcaaagccggcaaggagcagaatactcgtggtcacggagagagggtcgaccatgcttgttaaggctgaagctcagggaacaaattgatagagacataagaacaaataatgcttttttagattgaacgtaaatgatgacgacaagcagtgaatcaacattgtctacgactggcgttccgggaaaactatatgttccttcaattagcccagtgagcatggtcgtggtcctcgttttctccaatccaatttcttggagaaaaaaaagggggagccggctgggccggctggcaatggcccaatccctcaggaaattgcggcagcagggggcagtagcagaaactagaagagacagcatgaagtcagaccaagttagttaggatcgaaataggcacccaaattatcgatgctgttctaggcgaaattcgggataagcgtgaatctcggaggaaagacgcggacacgttaagtcggatttcggatataagcggtataccgagcaaaaagaccacaaatggggaagtgaactccgagggtggctgctgtattgagcgagactatataatatgatagattcctattgataggactgaaattgcctgccctttacagctctcaaatacgaacgagaaaatacctcggtcattgaaaatggggaagaacattcgtttgacctttgcatgcggtccttacgaccgtatggatcctctagctaacaaggctgtcgaccctgtcggaattgatctcaactacatcacgattaatcatccgcgggaaatctttgaccggatgatcagaggcatggagttcgatttatctgaaatgtccagctcggagtatgtttgccgatacgcggctggtgaacgagacttggttggcattccggtgtttccctcgagggctttccgccatagttgcatcgcggtcaactcagacattatctcaagcccatccgacctcaatggcaaaaggataggtgtccaggtgtacactatgaccgcagctgtttggattagaggggttctgcaggatgcaggagtcgatctatctacgattacttggattgaaggagacctagtcaaacctggttcccacggtcaacccaagacaaagccgctgctccgtccagtgtcccgagtcccaaatgaaagcccgaagtcgctcagtcaacttcttgaagagggtgagattgcagccacaattggcgctcacgctccgccatgcctcgcaaaagcatcccatattcgacatttgttcccgaatattcgcgaaaccgagaaagaatactaccagaggactggaatcttccctatcatgcatcttgtcgtcatcaagagagcggttgtggaaaagcatcctttcgtcccgcggagtttattccaggtaatgaatgagtccaaaaacattgctctgcgttcaatgagacttgcatcaacttatcggtatatgttgccgttcctctcatccgacctcgaagagatagaacaactatttggtggtgatccatggccttacggaatcgagtctaatcgcacagttttggaagcgctggtgaacttgctgtatgaccaagctatgatttctcgcaggatttcacttgaggagttatttccattcccttgtgaataagcagtctatgtaactagagagaattgtactaattcaaatccgtgaatgaggcgatttgggccgcagcaaggagaatagtagatggcagaaacgaatccaatggtagatcctagatgtccttacattgtcccccggataactgtcagggatatacatgaagcatacaggacggatggagatatgatctgcgggacccacatggtgtatatgggttcccctgaacgcgaggaagctacctttcctttgcttcctcgcgctacgtcttgtatctagaatagacaatagcttcctcaatattgatcattcaactacgtatacgtgagatcctcacaaggagcgcggcagctcctaggaccagtacatggtgtacaaggtaccgcgatcggcacaggtactaacgttcgcccgtatctgttgacttgtttcctgcatcgaagcggcgtctcgagaagatgtgctataatattctctaatacatatgtatacaactcccgggtttatcgaatagaagcatgattcggtagaccctagagaaacagcgaatacgcctaagggcttagagtaaaggtacagggattttcccctgcggtactatactcgggtcaggatttataatcgaaaatccatcccatgcgcgatatcctcaagctagccgtccagttccccgcgtggcggtcagggctgccacattctatcgtagctgttgacatctaccgcccaggattataggcagcgctagccacaggctatacagacggggttactggccgaggggagcatcccttcgtacacaagcagtcggcagcggcaacgaaaatggacaggcggcgagcagtccttcgctcaatttattcaggaacatatcgcgtgggttattcagttttagctttcgtgcgactgctaggataggcccaaacgcccgttatatcgagattgcggctcaccggcatctcacgagcccggcaaggtataggcagcaaggctaggcacgatggggtctagtaatggttcaggctggcgatgtcgataacggttttttgggggacatttcggtcgcgggcttgaccgtcagaatcgtttgcggcgagagcgctgcttcgaggacgaggaaggaggtaatagggtgatttgggcgggtcaagcagagtagactagtgatgcaaataaagcgaagttgctgaattggtcgacaacctaatacagttgggattttctcgggcaacttagcattctgcaagatgtatcctttgtagatggctcgagaaatcgcgtggagaggctcgcacgttctggactgagacgctcgggtcgcgtcgatgacgcgcctggtcgggattcacgtgacggggggttgtctgttgtctgtctccgcggactgaccaaatgagatcgaatttactagctgttcggttgcaattggatagggctggccggcctgatctgccatgtaaagtccaaaatgctgaaagctgagccagtcatgatgcacggaatgctgcacgcctgccctgaagggcgtacacgctgttcgggtctgtcctgaattgccgttcctcacagagattccggtctatctgctacctcgtccataatcacttctctcgtagctctccacgccgaccacagcgttctgtcatgtgatacccttatcgccaaacacagaaaatcctctatttttcaatcatgcaaaaaactgcgtgttgatttttggaatccttaattcgacttcagcagaatccaagctgaaccccttgcgtcacgtgatgaacttacggccgcggccgcaacgcgtactagagttttccggaattcgagaaggccatgatgcgccaattggaatgttgctctcttttccccttgccgctgctctcgcacgcctagaatccgctcgatatttcaagagacggcacgagttttgcttgagaccgcaggggaaaagatacacttttgtgcttggtccgccgatagttggcgcagggtgctgaagtcgaacacgctgattacaaccgtccgttttctcgtctgaactcttgcctgccgttgtaccagcctcagcctcgccgtcgcgtgtattccttgtaatggcagccgtcgcatgctctgaggcacgtgtcgggtggatgatcgtgggaacgaagagagtatcatctggcataccaggcttgacgtagtcatcgaagtcaacattgaagtggggacggtctgcaccgggactttatggagtctcgcagatcggcttgcttcgatcgcggatctttggacaaagtgcaagggcgtggatccgggcaaggacgtgcctccgatgcggtggaaatcagtgtcatcgtttaggccgtgcgtgttatgggacttcggtgaaaaagacgtatcagagaagcgaagaaagactgcccgcctgagatcgtgaggtggaggtcactcgacctcgtttcgctgaaaggagtcggggaaattcgctggcgttgagctgcttgtcataaggtaatatatcatattgtcggtgctcattgtcggctcaaatcgatggaaggtcgagtggtgtctcgaggacgtctcgatcgggagtggccaggcagatcgatcgcgtcgcgcggcaaggcggtgagggtttgcacgacgcgctgtacatgctcctactgggctctagttctagaaattggcagggacatttacaatggagttacattaaagtatgcgaaatcagaaataaaattaagcaggaattgcgtgtatatatactcggtactgagagaaagattcaaaatagtaccaggcaaagtagatgcgcgcgggaaccaaccacatccaccaaatacccgcatgtcaccgtatgtaaacttggttgagccctgaacgccctcccccatgggatagccctcggtccgccgtctactagggtatatgttcacctcctgctgggccattgctagaacgactggacggcgatccgaagaagtcgagacatgctggaagctcccgaataatagctgtggaatcgttgttggcttctgacgagatgggaattcaaggtcgggatccaccccgagcagctggcagatccggccgggtgtgatctggggcgggccccgcagtaccggcggccagggccggtggaatgagacccacagcgtgctgatgcgtgctccgggccgccgtgctccgggctgccgtgctccgggctgccgtgcaccgtcttgctcgtcgaggccggctagggaactgaaagttccctgctgcatcacggagggttccggcgtagccctcgacttgtttcgggctccgacactggctggacacgaggaagcgaccgggcagggaggagcctcgggatgggacgcagaaggcgaaggaggaggcagcggatcgacgggggcggcttggacgatcaggcgcgtctcgacgggccgaggaatcaacagtccgtgcggatcgatcacgcagcctatctcctccccctgctcggggcgcagcatggccgggactatatcgtcggtcggcatgtcgagcatggacaactcgttcagccggtcatgcgcactagtgatatccccggtaatcacgccgggccgccgcttctggccctgtttcccgtttgtgcagcgcaggaaggcgacccagttcacccagtggcagaattgtggccagtccacgactcgtgcggcgaggaaggcacactgcttggcaaaggtggtgccgtagccgatctgctgcaaccgcgcgacggcactccactcaaaccttttgtgtttctcagtctcgcgggcgcgatcgaccgcagtccggatgggcagccagaccgatttgtcgtccgcgctatacgtctcgaacatggccgtgcactcaaagatggcgaaccattccatgatggttgcgtcgagtgtctcggagagcttcacgaactgatcggcgtactccatgcagaggctgtactgctttgcggggttgccctcgagcttggtgaagctggttcggaaggtcgtgagcaagctcaggatcttcgccggcactcggggggaactgctagatgggagacggacagtacggtgctgggctcctctatgacgagtgggtgggctactcttctggtgatggttctcccctggactctctctgttgttctttttgctctctgtcagctacttcgagtttgcatcctgtgtcattctcacatctagtaaaggcaaaaaggtacgcaactctttcccaccagattatggggcctccgagatctcttctggtaatgggcttaacccggggggtgtggttgtgtatgagagtgtggtgggtggtgtgggtgttggttgggaagtgagagaagagagagaatattttcctcaaagagagagagggagggaaaaaagcccgacaggagagagtaatattcccctccaaatacattcatacaatacaacatcgaacttttgagtactcaacataacgagagagacaaggacaactccacggacaatatatcttaatacaccacaacccgagtccgaggtaggagaatctgtgcaaacagcttctaaagtagaaagtcattttgcttgtgtgtggtgagtatataagccgggccttttcattttgtccctttcttctgtcgagagggcaatcaccgggaaagagagagagagaaggtattagcctaggacgtatataagagaccacacacacacacatactccaaacaggccaaggcattctcacactctctcatctctctcatcccatcccactgttatcctctcggaccccacacgacgcagaggaaatacaaaagccaaatatcaacaagagttactcccccgtcgatgggtttcactgcgtgcgggtcaccaacaaaaaggtcgggtgccactcacgaccgtttcttttttggcgtgtgtggtcatgaaacggccagtcgacctcgggcattgcgacttcgaactctcccctctgaggcttcacttcagcgcaaccgcatacttcactgaggcagccactggaaccgggcccagcctcggccacacaacgatcagcttcagccaatggatagaccttcgaaccctctgggtgtcccaagcaccacagctggaactccgtctctttgtgagctttgatccgatgatcaaggccgccgaacccgcgtttgccaccgagctggtccgagaaatcggccttccagaggtaagcggctccctccgtcggtcactttcttgctcgcgctcaatcgtgcttcccgggggatgaggcccttccaagtgataaccctgagggtattaggtctggtccggcccaggtgctcacagcatgcctggcttcggtgaatatacatctcgaatatacgagctgcaataccacgccacagccagagaattgcctcgtacaaaagtccctggagctattgcgttgcggcctccggaaactgtttctatcgggcgcgcccccgagccatgatctcaggccactcggcaatgggaggctgcataagctaccctcactcgcgccggcagtctttgagccgaggtattgtgaggtgcgttatcaggggtagattatgatacaaccacggtacatatgctgatcggatatgaagggaatggagcaaagggctgtatcactcgctccaattacaacctccctcctctcaatgctcgagagtcatgaaaccttacagcagatgctcgtgatgagactggtaaggcccaccgaccgggatggatacgtaacaccggaatccgcatacggagacacaccggcgagcaaagccacagaccatttgggatgcctgataaaagtcacactgtggaagattgcccagcaccaactcgcgcgcctcaagacccgcaagacggctatgccatttttcaggttacccattgagctaccagagccgtcaatccatccggacgacgacgacgatatgcccccattgctcctgtcagaggaagaatttgattctgaagattctgaagatcgaggcgatggcgacgacgccaacggggatgatgacgatgacggtctgtgaggaaggaggagtgtgttgaagagagtaggtttggatgcggaggaaatgaacatctgcgccaactaggcagtaagaattgattgttggagactcaaggatttgaataacccctgatcgaaggagtactttgtactcaccccaataccactatctgcaagacaaaaacaatattgagcaatacagttctttcgcggtgaacaagcgtgattcctcaacagagtaatgtaagtggcctgccgaggtcgtaagtgactacatatatcatatgacaatgcagcaccaggggtctaagtttatcagatccgatgaattactaagctcttcttgctgggctccttgcggcataggtgacgctactaagaggagccattgaatcaattagcggctagtcaagagggttatattcgcacatttcctattctgtcgcttgtttctcctccaacaaccgcactcggtcgcggattgcaaacttccactccttcgctaccttatataccagcagcaatcctagtacgaagagagggctgaacgaggccacaattgccgtgacgctgatccagaccgccgcatccatcggccaagtggtgccagggtccactcccacagagacgacgacttgtaatccgctcagaaccatggaaaacaaaccgatcacaaacaagataggcccatagaaacgcacgaagtaggtcctatactggtactcggctctctggaagtccgacttgccgaggacaattgggccatagaaatttagccgcatcaaatgaatctcaccgtttacataacgcaaggagacatcccggtctgggatgccggctaggctcgacttgaactcgcaaaactgctcccaggtggtgtcccgcgggacaaggcacaagctagggtcctgcgcaatgcgcaagtcggactcgtgcagtcggtgaaggattctgcccaacccagcgatccaatcaaacatttgagctcatgatgttgctgaacgtctagggaagaagagagaggataccagagggacgcctaccatcggctggcccagcgaggcaaacggcggcggcctggaacctgctatctgggtaataggggcaacatgggcgatcatggtctatcaccgtatgggggctaatgcttgctacttctgtattcaaggagagcgtagtgtatcaagctgtgctggttcgttatgaaactcactaaagagtctaaaaatagaacatagaggctagcaatccataaaaaaaccccctaactaaccccggcaccgcggaattatgtaagttatcgagcgaaggaaccctgaaggtcagtttgactgactaatctcggatttggcggcagtaaaggcaagcagtacaccatcgcctagctcagcaacgcgaaaagagaaaataggaagatgcaagtcgtgtgagactcaaaagaaacagtggtcccactccgtaacaacggccgcgatagtcccaaaacgtctcctttcatcagcccctatggtctttcggaggtgtctggcctcaagcgacaccgctgcctgggaccaccgccttgacaacgtcagaaagggtcactgaactgcttccgattaggaacggtctgatcgatttccgacgagacaggatctgataggttctgccgttgtcgcctgactgatcgaaggaggatttttgcggtgcggatctcatctggtagaataaatccccccttgatcatagggttgggatggttgaggccaggaggaagatccgctgagttccgctggcattctccgtctggccagaccgtgatttttagttggaaattctgaaataagagtgggcggcacttttcatggacacggccaatgcacaacacgcttccagagaaaccccgcgcatcgacttgatcttcatcagttctccacagaatgctagcagaagaatcaacggcattctgaatccatatatgcccatggccctcgaggagagccgcccggatttgttcgttaggaatatccccgagcaggcggccgtgttcattattgatataatcgaagacacaagcaatcatcggtgctccctggatcgcgtctttatatgaagcccattctggcaccatctcaattcccttcggtgggtgaatatcaatcaggttatcgccggtaataagggaaaggtcgtgacggtagccggaggggtatggatacgtgctgcttgggtcatcatatgtccgcgtgataagtccgacctgtttcgttagaaagacttcattcaaggatgggtccgtactcaccctacggttggtgcccgctagccagcactgcttaccgattgggctcgaggaaagggggctaggcgtagtgctgacttcgacctcccgattctggagccgtagagggatttgaaaccgtgtgagagactgtgtgactcgcttgtaaaaagaggcaacgcgggtaaagaatgtagggggccctgggagtctcacaaaggcgtgggtagggacggtgatagcctccgtgtggtcaggaagccggatcttgaggcccaaaacgccacagacctcgtacgcattcgacatgcgcgcaagctgctgaccagactccgctgttgccgccgacggttgcattgccagaacggtatacccgactgtcagcctgccaacggtcggaggggtaccgaagttccatgtatgcaacatgtcatcccgacggctgaagaggataaccacacactcaacctggtagataaacgctccgatggacctcggaaatgccgctcttaggcacttaatgtcttctggcgtaaaagcctgccggacgtcgacgtctcggcggataggatccgaaatgatattgcaatactgcatgtcgtgatctactggagactcaaatgcaggttggatatggatttctcgaccgccagctttaatgaaaggcacatggctattttccggcaccacccaaatgtccttgcctgagtccttctgggtcaggacgcagacagctctctgagatgagaaagccgggtggtaggttcggaaaagttgctcattttcctgggtgatctgcggctcaataagagcgcgagcttcggctacagaacgagagccccacaaggtcgaggttgtccctagttaccaaggttagcaccatcgcaagttcataaccagcctcaaataaaactaatacccacgatggacctggcgtaactgtcgacctcggtattgaataatctgggaaaccggtcggggatgctcttgaacgcacgaatacgtcgccatggtcggtaacgtaaggaaaaggaggtgggtgaagcgatgagaaagggtagaaggaatctctcccctgcaccaacgggctatggacgaaaagttccacaactgctggcacgatatgttttctggtgctgaggagcggtgtatttgtcagtgaagggaaagcggcggggggtcattggagctgggtaaatcgggtcaatgagaagcttccaaccgaagaatgaagcaggagcaagtacgtagatatcacgacgaaagaggtctagcgcctgtcggaacagcagcataggtggatccccggaggcaggggatactatcttccgtcaagattagtcatgcatttgagcccatctacattgctagttgaggggcggtgtgggtgggcagaaaagcacagatataccctgcaccagcatgacccactgagcagtattccgattctcagctaaccattctacagccgccccgcgccatattgttacattttagctattactcttcatttcctaattatatatactcctactaggctctagttctagaaattggcagggatatttacaatgcagttacattagagtatacgaaatcagaaataaaattaagcaggaattgcgtgtatatatactcagtactgagagaaagattcaaaatggtattcagggcactcagggcggatattcacccacctgaatcttcagcccgtacagcaaaatttacattctcacttctgatcgaaatgctataagtaacctttcttttcccctccgcgttcatctctcaagcctcgctttgtcacgagcaagatgcgtaccaagcgtgactcaatgttgaataaccaccctcatttttttatctcccttgtaagtttataatctgcaagatgattatgatccgagtatccattgcctcacacgcgagaggccggccgccaaggtctatctgctacacaaatcagcacacccaagaacaattcggaagaaaaggataagacaattgacaacatgaaaaccgctggtttgaacttgaaatcaatgtttttatcggagtagaagaagaagaaggaggaggagctggatgctgctaatgtctcaatgagaaaagaactgaaagccgtcaaacctcgacttgaaagataggaagctttctttttctaacactcggtggttgattcggaatttgggtatcattgttgactgtatcggtcgagaccaggtgttacacctgccaatttcataaaaagaatacttgttgcgttgagcagaccggcccaactcagtatcatgcgggggtctaggatgtcttaccgcttgtagccaatgagagccgatacttacttccgtctgatttgcaacctgccaatcggattacggcgtgattcccttggtaggggggacggagatagaattagtagtatagagatagatgagccagagttgccagatacaattacgctattccgggcctctcagagaaagcgtaagagtagggtagatgatgatttatagctatactaggaaattgtattgagtttactttctcctgaaaattttactgaaaattttgccgagtcctgctataattacaatacgtattgttacaggcgaggatgtattacttgtgcatccgtgcagtaggggcctgtttgtcttgtttgccttagatttgggcccgaacaggggtccgaaagcccgcgcgggcccatgggctaggcccgtgacccgatcacggnnnnnnnnnnnnnnnnnnnnnnnnnnnnnnnnnnnnnnnnnnnnnnnnnnnnnnnnnnnnnnnnnnnnnnnnnnnnnnnnnnnnnnnnnnnnnnnnnnnnnnnnnnnnnnnnnnnnnnnnnnnnnnnnnnnnnnnnnnnnnnnnnnnncgccgcgggcacgcgcgcggggggggggccgggtcgggtcgggtcaaaacgggctttggagaagtctaggaacaagataagcagtccgaggggtagcttgatgacagacttcgaaaaaaaaagacaatcgagtgttcaatattcatttcattctgagcgccgtaatttcaaaaccaagtgtcatgatatttcacgttaataacagatacaaaaaagtagttgacgagactgaaccaagacaaggaggaaacttagtactgaaggagcggcagacatacccgaagtagtttagcgcggtgtgtgtcgcaagtaaaagagtgtgcgtagacgttctcttcctcgatcgtcaatctctcgcgatagttgcagtagaaatacgccagtctgatcgtactatcgtgccgtatgcgacgatttggatttcgccaatcacaccggaaatcatgagcgtctttccagtccctggggcactgggacagaaaagggtgcgccacattgtttgatcttgatcttgattggaccaagggacgaattcgttcggctcgaggaaccatcgcccggtaccgttgagccagagctttaacttatcgtcttgtttcattgcggtattggtaggagagatccacttcatgagatcaagtcggtccttctgattgagatgctgtactatctgctcgattcctttctgattcaagactgttatgtctttggtttcttggataacttggctagtcataaaaaataaggtcaaatcttggaccctttccccaacttggtatcgaagttctctcactgccgtttggtcctatacaaaacgcttccaaaatagcttcattgcggcgcgaaaattgtttgtgttgatattaaattccccataatcgtccagtttcttccggatatccctcagtaagagttagcatcttttgaaatgtcatgcagagtatggttttgttgctcactcaaatgatggtcataatgctgatcagccagattgaaacatatttgacaatgtttcgactctgtttcgactctgtttcgactctgttttgtcgtcagcaactataatatcggctgtactagaaagctggatatctcactcctcaaaaatgatcctgtactgcaacggtgcatctttgaattgtttccgcagctcattcgcaagtttgaggaaagtatacatgtcacccgcaccatacccaaaattctttctagtggcagaatgtaaaggtatacgttatgcgggtgtaaggcctgtccactgggtaagatacaataggctttgtgggaggaacacaatgtattgatgttgtgaatgtattgatgttgtgccacttgccagtctcgagggggtcccgaactataaggaaatattaagcaaagaagcaaacacataatggcaaataatctatggaattcaaaccgataaaccatgcaggcagtaagcgagcaagcaaacatcaagcatataatagcgatctatcgtatattgtgacaagagctagcaaaccacctgaaaaagatgagataattgaatttgcatggtgccaaatgcttcatgatcatggggtcatcgggcctggttaatctgtcaaggaccctgcgcactatgcccctttgtaatacattcttagatagcttcgtaggatcgatgatagcgtaaatacttgtccaaacaccgaacgccttgcttcccctcccccaattcataacatttggaggatcatcagttcatatcataacatgatcccctgcaccattcatcaccattaaacatcgtcactcactagcaactccggtgggccggaaaactcgatgcagatacaatcaccgcaatcgctaccgcctgtgtttcttcgatcagaccagattgatgcaattcgaagttgaaagacttaccgtggccatatccatgcctggcataatcaccatatccatggcaggtcgatatcccgcctggcagaaggacaacaacgctaactttttattatgccgaatactctctttgatttccataatcctacgattgtcatccaccacgtcatacatcgtcagaacccggccatggctttcgaggtcgatgggcaaattgcgttccttcacgttgcaatctacctgtatcaagttctcgagctccagatgcagatctccgccgagactgtgccgaccgatggcgatgggggtcgtccggcaaccgggaagggatacggtccatgtattgcgtacccagcgcgatcgttggtggatttcgaacaagggtagacctgactgatctcgcacctcccgacaataatgcgggctacatcttcgcccacttacggtgaagagaacggcgccattttcatcttggatggaataggcgcattcggagacggcactgccgcctgggtatagggtgagatgcgtcttctgctctgtcatgtattcaaaacgcaggccgattgggcgcagaggctctttggcaggcttgcgaatatttttgttacgatttctcgtggggaatgaggcaacggatacttccgatgtttcgcttgcgattcgcgtgggcttcgacatggtcgttgttgttaaacggaatcgagacaattcagaccgagtccatccccgtcaagctttctgaaatgatatttggacacagatagaatcgtagaggtcgccctcctgtgggcctctgactgagtacctcgacggactaaacacttccgaccgccgtgtcagcaggaatgtagcaggttgccgtggaatggagaaacccgatttgaaccgtcgcagtcgaacggggcctagatttgtgcaaaagtgcagtttttctgtatggaggaaggactacacttcatccgagtcgtgagaagttcacctcggcaagctcatgatatcatgatgtttggtcccgacccccactgtaccagcagcctctccatcctattcaagattttgatcaatcatgttcaaaacagaaaatggtcgaaagtcaatcaggtctcgtatgacatcagtcagatcaagcccaagtctagccccaaggaagggcgggaatatcctggaagttttattcgtgagatcatctaaagcagtggcagatacaatatagtatagtttattttaagttctttcgcctgattggctggggaacagggggttctccaccagaccggctacttcggatcttcagatgtgcagatgtgtgggggtcatattcaccacggaaggattggcacggaagaatcggcatggcatgctctgctagcctcactgaattcgtgatcgaccttacgagattgacagactcattgggatttcaaaatcaaaatattcggttgatattaggcgcagcgcaagctgaagcatggagaattagatacaatttggtacgcaatattagaaatttcctcagcaaggcacctccctcaatccttaatctccgtaatctcccatttcgcgcgctcttccctccgatccttcacgaccttttgtataatgagggcgagaattccaacacccacgacaaagacaatgcaaaacacgagaataggcccgggttctcgcgaggcccaattgcgcctaacgagctcatcgcggacttcgatacccctcgcgggggaaggatgaatggcagccatctggtgatgcagtttttgagagcaacgaactgagttgagctagatccagctccgacaagtcagaaatccaacggtgtgccatggttgaaaacatgatcatgatctagtctgacttacatggagggtgggtggtcgtaaatatcagagatcagaggtgttgagcagtctgtgggagagtgctcgaaagaaggtgttcaacaaggaagatctagggttgaagagatggcaaaggagcaggcaatagttaacaaaaaccctggagcagactcttgctagaattcaatgcggaagaagttgtctatagcttttccggttctctgacttctgtgacgacatgagaagggctcggcttgcgactttgtcaatatcaatcctgattattgatacggagtactgagcttagatatcgcctgatgttacccacatctgaatatacgacgaatagggtaaaccggatgcttcaaatctttccattctcggcgtcattatcatctctctgcaccggcatgaacggaccggtctatgacatcaagacgaaagcttcttttcgtttgggaaagctcggattgccaggtcagtcaggtccacctcgagcctctacctcatatagtccagcctctgtcgttttaaatcctactcaataatcacttcgtgagaggatcactgtagcgagtgaaaaataaaatccctctctccccttccgttcccctgtcgtcgctgctctcgtgcccccacgagacctgttttggagaatgtcgtctgtatccaatcccaaccgcgacgtcgaaaatgacgctgcggagcgccgattctctgctatttcctataaggaggatgtgaagatcgatgaatacacgcgcctggtgcgatggatgtccacctaccgtgatacgaaatgggaccaggcagatgaaggcgaaattcgcgagagtcgcgtgtggtttgcgccatggcggaagagaaagttccgttggaagtatatcggcgtcggacaggagttccccgatgactggaagttcaccgacatcaatcacggtctgtcggactcggaagtcgaggagaggcgaaaggtgaccggattcaatgaattgacggcggagaaagtcgatcaattccgcaaaatcttgggatacttccaaggtccaattctatatggtgagagactatcgcgtccccgccgattgaacgcagacagtgacacactaaccggacctcgacagtcatggagattgcagttttgctcgctgccggtttggccgaatggattgactttggtgtcatcattggcattctctgtctgaacgctgcagtcggatggtaccaagagaagcaggccgaggacgtggtggccagcctgaaggccgatattgcaatgcgcagcacggttgttcgcaatggaacggaaatcgatatcttggcccgcgacctggtccctggcgacgtggtaagatgagttccctatcctcttgactatttacctctattaacacatcttgtcatattcagattgtcattgaagaggcgaactcggtccccgccgatgccaaagtggtctgcgactaccaagagaaagagacaggctggcagaattatcagcaaatgcggcaagaaggcaagctggacaagaagaagaagaaagcaactgaggatgatgaatcgtcggaagaggatgaacacaaggacttccccgttctggcctgcgatcactccgcaattactggagagtctctcgctgtggaccgctatgccggtgacgacgtgttttacacgactggatgcaaacgaggcaaggcctatgccattgttcaatcgactggaatcaagacctttgtgggtcgcacagcggcgatggttcaacaaggtggctccgggacaggacatttccagatggtcatggacgggattggtacggctcttctggtgcttgtgatggcatggatcttgatcatgtggatcggaggcttcttccgcaacctgcccattgcctctcccggtcaacagaccctcctacactttaccctttctctgttcatcattggtgtgcccgtcgggctgcctgttgtcacgaccaccactctagccgtcggtgcggcttatttggccaagaagaaagcgatcgtccagaagcttacggcaatcgagtctttggctgtaagtattccatcccgagtttctctcacgaccgattttcaagccgatcactgacgccgactagggcgtggacatcctctgttctgataaaacaggaacattgaccgccaataagctcagtatccaggagccatacgtcgccgagggcgttgatgtgaactggttatttgcggttgccattctagcttcttctcacaatgtccgttctttggatccgatcgataaggttacaatcttgtctgcaaacaaatatccgaaagcgaaggaaatcttgcgccaaccgtggaaaaccctaagcttcaccccatttgatccagtgtcgaagcggattgtgtcggttgtgaccctaaatggcgagcggtatacctgcaccaagggagcgccaaaggcagtgcttcagttgacaaactgtgatgaatcggtagccacgttatatcgacagcaggcgacggattttgctcgccgtggctttcgatcacttggtgtcgccgtccagaagggtaacgaaccatggaccttattgggaatgctaccgatgttcgatccgccccgggatgataccgctcagacgattttagaggcccaaaatcttggaatcgcagttaagatgctgactggcgacgcgattgctatcgccaaggagacttgcaaaatgcttgcgttaggaacgaaagtctacaactccgaaagactcatcggtggtggtcttagcggtgcgatggcaagtgaattatgtgagaaggcggacggattcgccgaggttttcccagagcacaaataccaggtagtcgagatgctacaagatattggtcatcttacagctatgacgggtgacggtgtcaacgatgccccatcgctgaagaaagccgactgtggtattgcggtggaaggcgcatcggaagcagctcagtctgccgcggacattgttttcctcgagccagggctatctactatcattgattctatcaaggttcgatccactcaactcatcaatttctgcacattgatcactaacttgctgctagttggcgcgtcaaatttttcaacgtatgaaatcgtatattcagtatcgcattgcactctgcattcacctcgaagtctatctggtcactagcatgatcattatcaaggaaagcatccgcactgatttagtcgtgttcctcgcactatttgccgaccttgcgacggtcgcggtggcttacgacaacgcatccttcgagcgccgacctgtccaatggcaattgccgaagatctgggtcatctctgtcatcctcggtgtcctcttagcactcgggacgtgggtgatccgcgcaacgatgttcctgccgaacggtggattcttccagaattggggctcaatccaagagattttgttcttggaggtcgcattgacggaaaactggctcatctttgtgacgcgtggaggcaacacttggccctccctgcctctgatcattgctatcctcggtgtggatgcactcgcaacttgcttctgtttgtttgggtggttctcgaaccaggatatgataaccgatccctttgatcaatatatcaataaggagaccagcaatggtttcacaaacgttgtcgatgtcgtccgctgttgggggtacagcattggtgtgactgtggtgctcgccctcgtctacttcatcttgaacaagtggaaatggctcgaagacttgggtcgcaccaagaagagcaaaggcgatattgccattggaactatcctcagtcacctgtccactatgagcctccaatacgaaaaggacgcggcgaatcatgggcgaatttggctcggcactaccaaggaggatgagatggaataagcctcaacttctttagaaagacatcattttgtggttcttgttggtggcagcgcggttgattggggagagtgtggtcatatggattcatgggcatttgtcttacgatgaccatcgaccgtgcaattttctattaatcagaagtggtttccaccacttccctaattcactaataatctctcttgacattttggcaatacaacggctgactcgtgtcaccatttacattcctttccgttttgccttaccctgatgcttataagttagatgcaactgtttgccattctctgtactagttatattttgctgcacttcactcgctgcctcatcgtttatatagaccattttgtcttgcgacagctgtgatgcaattggaaaaaaattacggggtcacctttgctcagctgtatgcgtgaaaccctgccatcggcgatgaccgtcaatctcttttgcaaggttatgcgatttgtattgcctccactacgactatcacaaccaccgctgcgccgacacaggcgggaatgaccccttcttgtacataacaatacacggtcaagtccggcgatgggtgtgctgcgattgaaagtacacagactgtcacttttgcccagctttgtgcttggagcgacgccatcggtgacgatttccagtatctttcacttggttacgccgtctgtgccgccatcaagttcacttccccaaccacgacatcgactgcggcaccgacaggaactacgaccagcgtatcttgtagtgaacaatacactgttcttcaaagtgactcatctgctgtgattgaatccaaatagtaagatactgttggtccaaatatagcatcagttttgccggattcaacaagcggttctaaatgatgcattctgacgttctcattgttgccctatgcagtttgcgccaagacacgagttgagagactagtgtaggaagtgcgactttataagttcgagttgcgatgcgtaactatttagtgaagccttaataactaccaacattactaagcatcacgttttgtttagctatgtaatcgtggatcacgcgggataagatgacgacaacgattcgactttccttatttgctgttgcactctatgcatcatgcaagttcagcagcgcgttcttcgcatagtagcagacccgaatcactttttctctaaccagagcccgagttcctttgaccagctaaaccttggttgataactcccaaacatgtcttggtatctcaacgcctggattattgagaggactgatcagtctaccagcagcccgttttcccacagagatgtggaagacacacgaactcattcatctctcccaccaaacgcacactcacaattgaaggtcttggtcgccttttccacaataaagcgcttagatactatttcgagaataaggtaagagaacgccctgctactcaagcctgccacaaaaccgcatcagcaacagagtcattttctacattcttaaactcggcatcatcattgtcatggttcctagtagaaatgcagccaaagcggacaattgcccgtgaaggctcgagcatgcggcctttggttgcctatgaaagtgtatttattggctcctctataacacaaactacctgcaaagtccttctctggccgaaatcctacacctaaagttggctgtacagcatagctgtctcatgcataagaccatgattagccagcctgccccaggtcagcacaccactcttttgctgaatttcctcgattccaaactaacgatctgaattacggggttaaatctttgcattcttcgagatgactacgacgactcgctcagcctgtgacaaatatgcgagtgagcatctcggtggctatgtgatgcattctgaggagatcactgtcgccccatgcagtttgtagacctctccgtgcggcattcctttccctttctctttcttcctctggaagataacttgccggcaaacgcgcagcttgccgcgtcggcgttctctttgtatgtctgcagagatgcttctctcatgttctggtggatggaatctggcttgctttgtggtgggaagctatatagacaggcttcagtacagtagctagtttcagatcttccatcaacatcatcttttgccatctggttgatcacttcttccctcgtagtcaaaacctctcaccaccatgtcgttccagtcgacgtgcaagctacaccgtggattacgagccgagaaacaacgcgtgtcttttagtccagcaaagcgatgcttggtcaatacatcaccgagcttgacgaggcggtcccaaatgcggagggcatcgaaaatcccatattgaagcttactaccatacaaatctctaaaatctctagtttgtaggcgttgaagctctcgcaatttcaaaacattctcatcgattcaactgcatcttaaccgcatatatcatcatatatcctcatcgtcatctgtcattatcgattccaatacccctgaccgtctatcgcccacgaataatctcgaccttcacaaacgtgagatgcttcatcttctctccacccagacaacgcatcattcgtaaagcattaatgtcttgggcttgaaaaaaattgaagaattcaagatcaaccatcacggattcgagactcgaaattcctgccaaaatttcaagtatactgttcctcctttactgagatctgtctgggtaagcatcgtacagcccgtcagcaacgcgaatgttgctgaaagatacttcaccctccccattctggaagaaccgaatcccagtcgagttctgataccaaggccttccgtcgagttagtttacgttctgtggaaatgtgaaaccaaggggataagggaaacataccggacccaggtagacagcacaaagcgagagttggcatatacctccaggacagagttgtcgaccaaaatggtcaggctgagagtctcgatgcgatcctcgcagaccccattcgatgaggagttgtgggcatgactttccgatgaaatttcggacttgcatttagtcgaataaggttcaccatgcttacccttgtgaccacacccgtggccgccatggccacaatggccgcaatcggcgccacagcagtcattgatgtcaaatagacgaagacgccccgactccggtgacttgtcgatgccggtggttgtgtttgcagcagcactcgtttcagaacgatcaatcatgatggactcgttggagaactgataataaacggtggttgactccaaatcggatgccaggatctggaaaccggcttgcaggtcggacgaacgtgcaaggaagtcgatctcagcctcaagaataaagaactttgtttccggggagcgaccgaacgggattatacccgaacttgtaagagtttggtctggctcagtgaagctaggggcagccttcatagcgttgtacggctcccgcgcgatgtcgattccgagtgtttccagtttgacgcatttgcccgtggagggtgaggaagcggccaaacgccacgagccaatctcattcacaagacggttgttgaccacgttcgggatggctttgatgtacaactcgcgcgacgtcaacaatgtgttttgccatccttgttgctccgatgggaagcccacaactcctccgaaaacatccccagtcaaccatacatagcttataaaacgatccggggcaccgctagcggtagacgcttgggaggacgcgggtaggactttgcctgctgctgcataggccgccaagccccagtcaaggacacccaccatatcagggacgaatgtcacgttttcaccctcgggaattgagattgaccctgctgcccaaagctgtgcatgtagcgaggagattgagggctgaatgggcacgtatgagctctctactgcaatggtcatgaaaggactgccgttgtggctgtatccttctctgtcgaggccgaagacgttgctagtctcaaaattgtagccgaatacttttgaccagtcaccattgccccatgttgagttggccggttcatggtaccattctccaagatactcccactgctcaaagtcggggctagtgttctggtagaggaacaggccaggtccaatctccttgaccccgcctgaaacgattgtgtaccaagtaccatctgtgttgccaaggatttcgtcgagtggtccattttgaaaaacaaaagggtcgcggaaagccgttacatccaggccctctgggggttctgggataacaggtggaatttctagcttggagaagttttgtccaccgtcgtaggtgaccgccagagactgcgattcgcttcctcggatataaggaagcgtccaatggattggcaatgccgagaccgaggtgtataaaagtgtcggttcgccgtcaactccagatgggatgaccgaaccatcgaaaacggcaagggggtcattgggaccgccagctacgattgaatagccaccattagggttgacatcgtagaaatggactaaatcatccgtcagaacaccggcgatcccggtaccattgtggagaaacccgacgtggaagagccctgtttcaggatcattatagtgcgcgcatgggtcgccgatctggccgttgggtggcagcacatgggtatgcggcctccaagtctcaaacaaagacagcgggggtagatccgcgagattcggaggtggagcattgtagtcttgagcagtggctcccgccgagatcgagatcaaaactgctgctaccttgatgatattcatgacgaggaaagttagatgagaaaatacctgcgaggaatgaagaactcgttgtacatgaatcgaactgatatttatattctacaagagggcgattttgtctcatcaattatgcaatttaatcacaagagaaatagcgcacattctaatttcaacgacagtgagggggtagccatacatccccatactggggtgatcctagaatgtaaacgaactccccgacaaatttcattttttgggggtagccatacatgtgcatactgagggatcctagaatgcaaacgaactctccaatgctttcattcttcggggggtttaaatgagtggcttgtgtaatctcgccgagacaacaacaatacttagatgtaacgacctatataagcaaagcgaaaggaatgcgagcataccttgcttgatgtatcatattcctcctagagcgacacgaaggtagtattgtcacattcctcctaagatggcaattctaaattatactgttgatatgaggcttacattcaatcatgtacgtgccccggatcagccagactatatcgtatattaatgcgaagcgtcaacttggagtatttgcagaaaatctccctaggctcaagaagaaatctcaatttaccatcatgatcccactccccttggcctacattctgagtccaaatgcaaatactctccggtaaagtcactagtagactcactacaacccgccgctgttgataaatatggagatattgtccgagatcacagttctatagctccaacttgtgttgattatggtctgacaggaaaacacatgtgacaacaccaacatagctctgtttctctggttctcttctgtccatcgatcatccaggaaaatatgcgtattgtttcttcctttcattccgtaatttcaatattagagatcctgcaccttcctttctagttcttacccattgccatatgccaatactctcggcgcgcattcttaattcgactgggtatgaaaaaggctggtgggcgaagttaggcagactatactaacaccttggtggttcttcatgccagggaaccgaaagaagcagagatatgcattagggaaagaaatttctagatccactagtcgtagaacatgcacaacgagatatcatgatattcgaaagctcattccttatgcgttttcaaatcctcgttcgaaaatggaatcagctgaggtgtgagatctggggccctatggaactttttgtcaaagggccacattggacgggggatgcgacgatgcccaagacgctgtagatcttgatcaacaccaccaggagtcaaaccaagcatccagtctgccgccatattaaacagctctggttctagatagccaatcttgactatgacgatatctgatgttcgaggattaaggtcaagaccgttaaagtcactctcatggtgatatggcttgcggaatttggtcaggatagtaaacacacttccaacctgtagcactgcttcgacttcggcatcacgatctccatacctgatggaatgaacacgtccagtcatggtgacaggcccagagtggagattgtccacctgtgccccggcggttaccgtcaccgtggcacccacgccagccttggttataacgtcaattgcttggggtcctggaatactagcatagatcacagatgagcttgattctttagaaaactctgatcgcttgagcagttgatccaagccgaaggtcacgtcgcctgatccaccagcggtaggattatctcctgaatcagagatgaagaaaggcctcttcgaggatgcgagcgcgttgtcaatgcactcggagaaagacccggtcggcgcaacgaaacggaagtctttatggacttgccagaacaaagacgcaagtctcttcgctcccctagcaacagcaaccttattccatccagtgaccattactacagcgtgatttcgtggctcatctgcccacgcatagccaacccatatggctgcatcgaggacatcatccatcgcttcgatctcgggaatgagcgaatacaggcttttagctggttcgttgcgagtcgaagtctgctctcctggcagcaagataggaattgggacccatgctttcaggggtctattccttctcccagtgtcggtttgcgcagtcaaaacatggaccagattgcgacaagcccgctctttgctctccaattcatcctcatgaggtgccatacgataacaagtgatcagatcagtctggtgggccagctctcgggacacattcccatgcaaatccatagatgccgagaccaaaacatctggaccaataacagtccgaatccgccgaagaagctctccttccacatcttctatatcctcaacacacattgcgccatgaatatcgtaccataatccgtcaatggggtttgaagcgacaattccagccaaccgctccagtatttccctggaaagttgttcgaaatcagctcgaaccacgattccacctggaagggcatggcctatgagtgcccccttccaatctgcggcgtctgctagatgagtgccatgatgcagaaatgcgtattcctcgatcacctccgggccacggcgcgggtgaaacgccccaccgagtgttcgagcgggggaaaagctagaggtctcacaagcaaggcctgcgattgcgataactggtcgttgagacatgattcgcggagggtgaagaaattgtgccaattgtacgaagtgtaagaaacgtaaggatgggaagatgaagtaatgttacaggatccaagacaatcgcgtcagactgcttttccccgctctggtgacaagaccatgaggtgaggaaagagcgacattgctgcgcctgtctgatattcatatctaaagagacaagggatcaaaattcaaaatataaaagacctagccactgagtaaatagtacaaaggtagtgggcacggttgtaacatctccaatcaggtgacgcgcgggcagtcgcacaaaagcgcgtcttcccacttgtttccgtcctctccataccaaccaatctaagtcatgagtcaagctaatattacacaaagaccaatcctagagattgcgtgcttcaatcaagaatcggccgcagttgctgcgagagcaggagcggaccgcatcgagtgagtatcttattcatgttcaagctcccggcaacatgcatcctgaatttgttttccttgttgctagatatccctacgttctatcactaattgcagccaaggttatgcaaggactaccacctcggtgggctatcgcccgacacagacaccctcgaacttttgaaatcacagctcgcgataccgatctacacgatggtaagaccacacgcggaaggcttctgttacgacgaatttgactttgaggtgatgaaacgaacgctcaattctctgaagtcctacggggctgacggtttcgtcttcggtattctgaatcgatccccacaaaagccctttgatccgaaaatgtcgtggatcgatgtatcccgtaacaggcagcttgtcgaactagcggacgggcggccctgtacctttcatcgcgcctttgatctcattcccgaatcccactgggagagtgcattggccgacatcatggaatgtgggttcgcttcgattttaaccaacggcggtgcttcggggacaaaagcaaccgactgtgtcgataagctgcaagctctggtccgttatcaaacgcaaccacaggggaaaataaaacttcgaagcaatatagttccagaaatcattgttggcggtggtgtgagggcatcgaatataggcttgctccacagcgtcactggtgcctcggtcttccactccgctgctcttctgggatcggaagaggtaacctgcgcaaatgaggtgtttaagatgaaagataagatatcacgggtatcggaggcagatgaaatggcgcaataatacttccacgtattttgtctgctttatataccgaacataaacccgagcaccatttggtcagaagtgtatgccattttcccaaacgtcttgcagcatttttggcctttgatttgtataattaacatgatgaggagaaaaggaatgcagaggcagcggtagaaatccaagcatcgagggcaagttggttacaacatccatcttatttgtcttcagattttcgatctcggatatgctgtttaccattgtaatcggttatccggctgttccaatgcctccttttcaggtcctgggtgaaatttggctggggttattgcctcaagcaacttgtttccgaatagtccaaaagccgaagcaatcccaccaaatcggaagatctcgctttccatttgactcagcttgaatccgaacgtcttgtcggcgactttgatgattcgtgaactcaaatcgatggagattgacactccatcattcacaagctgaaagaaggattcatcttccattgtgatacccaggagcccgagacttggcatattgcgttgaaagatgaacgaaaacgacttggctatgacacattgaacaccgcaccctagaagaaacccgtggtcagaaaacagacattcgtttcaatggcatcgaacctaacttacctaacagtgccatcactgcttgttcgcgggatgatccgcaaccaaagcccttaccaccaacaacaatgttgaaaccctgctgggctcgttcgcggaatgttggatatctatacaccaggcagcacatgccagcgtccatgttactttttatgccaatcagaaactcagcaggagccaactttaaaaccatcagctctggcatttgacgaatctaatgaaagaataaacactcactgcatccgtgtcgatgaagtctcccagtttctgcactttgccttgaagacttttgacttgtctttctccgtctttatctagccgcatgttctctatgtgcttctgtgtctgggtcgtggcactaggataaccacgagaaccacatggctcaacatatgccaggtcgctcttcgagttggttgtattcaagtgtatacgtgttgttctgagccgctcccattgacttaaatcgatcgacgcaatcagatcactagggtcaactagcttcatttcaaaggaggatgctgcgacagtggctgcagaggcgagatgaccaattgaacctaaatcggatgatctcaattgaccgtgccatgttattgaagagtgttcattacctttacccatccggttttcgaagttgcgattctgcgaggaaatccatacctctcctggcgcggcctggtcggctgacatcccgacacaatagctgcatccagggatgccaacctcaaatcctgcgtctgcgtatatatcacataaccccagttcacgtaagcgatacaatattggcattgaaccgggaacgaccttcctcttcccctttgcggtaggctttaatccccttttcattgcttgttcgattaccagagcaccgaggatgagatcttcctccgtggtagtgcaggcaccgataaaacatccattcagctccattccctcttcttccgtaactggaaccacgtcatccggctttggataacgtgcgatgaaagactccacttttgaaaggtcaatctcatgaactgcggcgtactccgcatcggtatcgggcctgaaatatgccgtgtggcatttatgacgcgtaagttttcgtctactaatgaaatcgtgggtaatttcatccggcacaaataaaccagtgatcccgccaagttcctgtcattcatgttagtgaatttgacccaactgatttatggtttgtgacataactgtggtcatgtttgaaactgcgaagcgggtgtcaagggacaaatgcctgagtgctggacctgtgaactccacaattctgtcggatgctgtagtattccgtttgagcacttggaggatgtataaaatgatatctttgcccccaatccctggcttcggttctccaaccaggcgtatattgatggtttcagggactttgaaccatgtttccccagttactaatggaaaggtgacatccgcagcgccgagtccaaccgcgagacagcctactgccccggaggaacatgtgtgtgagtctgagccaacgaccagcattccgggttgcgcgcgctctcggtagaattcagtgtggagaatagtgtacttcataggcgtgattcagcgattggaaaccccccgacgaaaagagaactgacattgatgccttggtattccgtcattttgaaggttttcttcgctctctcgcttacaccgatcagcgcctgcacttgaggtaattcattaatccggggatcaacaatatggtccccagaaagccagaagcgatcgtttcggaataccccgggttttcctagcagattataggtcgtttccattcccttgagattcacaatcagcccgcagctcacagtggctctagaagcgaacctactgcccaagacacctcagaggcaagtatccaatcaacgtggacacgaattatatctcctggagccacccatccgatgtgatttaaatcatgcatcgcaaatattttctcactcacagtcatccctcggcgaccttcgggcctgtgtgttagaaggcaaggcattgatttttctcggtcggctgaattcagggattcgagccacgcatccacaagaaagaatatttccgattgttgttgtattgtcagagaatcaggctggtttattcctaggcccccaagcatggctggctggtagcagatgccaaggacatcggtcaggacatcgacctcccgttgcttcgtatgatcggtgcggagaatcgttgagatatactccaggttttgcaacgcattgtgtgtggaatgggatgtctctaaaagccccattgtcctactcagaacaggcggctcagaggggatcaagcatactgaccatttacatgtatatgtattccgcgagtctgttctaaaatatgaaccaattgattgagacttgattggttgctttcaggcatcgttcatgatagatactttccaaggtttggtctggtggtcttgaaggggctaaccggtcttaatattcatctagcaaggttatacagaggttgtacagtagaacaatatagtgatgcacggattactcggtcttacaccgctcgaaagcgggtactgcaacaccgaagggatttgacttgcagatgccaccgagtagaacatacgggcgcatgcatgccaatctccaatgctacctttatggcagggtccaagatttgccgcgtaatcctctacgggagcatagcacaactcgtctcgtgatctaaccaatatagaccgcggggtcctcaacagaaggtgcctattgaaccagttgagtagtcaagtctgacattcataaatagggtaacgggcaaggtgaggtatttaatttggactcgacctatcattatacgagtccgaaagtatccccaatcctcccaatctatacgaagtactctccgtacatacagcacaaagatatccttgtatgtacatatttacatcatgcatcgtgccgttgaccaatgatacatgagtacacactagtacccgttgacggaagtacatgattcatataaccagccaatagcagatcccgcggggagctgatggttcttccgtgtggggaaccataacgccaaggtttcaagtcccatggttgacgaagttaggcaagccacgagagataatttgccgtatccgcggccaatcagcaatctccttgtgggctccacgggtttttaatatgatcctgaacccgtggacctcttcagggttccaacactttattattctcttctctctctttattctacgtccacatacaactgttgtatattgtcctcctcacgccttttgcttatcaaaacagaacattatagagagagagaagcaatatggaggccatcgctgtggatccagacttgtacgcccctgagagttcttatagccccgatgactggcagtcgtgagtttgcatgtgattatccatcttgtacttcagattttcctcacgcgtcattagggaaactacctcgattgggtcgtcaatctatcgtggtttgatggataatgggagacggtaagagcttcacagattggatcacatgatgatctcacataacctcacactcctatagatatcaatcgctctccaacaaagaatactggtaggtagttggaattactcacaataagaataaactcatctcaaatgtagtattccatccgatgagcaacagtttgagacctacgaggcagggtacgtattgcaatcccagtccagagccggcctctaactatcgcggcagacacctcgtggatctcattatggactcagatcgagccaatccactgtttcggtcacccatcgggaccgaccgagaacgcccgctacaggttctcgatattggaaccggaaagggaacttgggccatgtacgtctgtagaccgttccgacctcggtgaaaatgtttagggcttatcattcctagcgatgtcgctgatatgttcccaaatgccactgtccgaggggtcgaccttttcccacctccggttacctggatgccacccaattgcgtcatcgaggtcgacgatgtgctgcaagagtggacatggcgcgaacaatttgatctgatccatatgcgcaatatgatcggatcgtttgactctgctgagtgggacattgtttaccagcactgctttgagtaggttatcaatacaacaaagtgtccggcccaatctgactgcataacagcaaaatggcccctggcgggtggatcgagcagatcgaggccggcccttttatcacaagtgacgatgggagtctcccagccgacagtgccttgtcctcgtggggtccaattatacaaaagtgcggtgatcgcgctggtcgctcttgcgatatcgtccttaccatgtcggatagcatcaagaacgcaggttttgtggatgtgcatgaaaaaatctacaaatggccaattgggccatggcccagagaccaaaagttcaaggaggcaggcgtggtcaattgccaacactggatgtctggtatggaaggatggtgtatgtggctgctaacgaaatttggtgatcccgagccgtggactaaggagcaagttcatgtatactgtgccaagatacgcagtgaactcaaggacccacactaccatgcgtatcacaaagcgtaagttctgatctgtcatcgctcgcgtcgctcacaggccaaactgaccaccagtataggagaagagtgtgggctcgcaagccgatgcctggtgaagtcccgcctaggtcatcaaagtccagctccagttccgctagggcaaaaccatgaacccatccgaggattcacctgtcggataatgtatcaggagtggacgactcgccttcctcggtcttctctggtcctctcgaggatcggtttgttgcttcgtttgtatataaatgatgcccgtcacgagcgagctatgttcctttcgtcataatactcaccgttcaccctctgctacctgctaatttagacctatacaagtggtggttgttaggacaaccaagacacgtggggggaagatgtagaagtccatatacataagctgattaagcattgtgattgcggagcgaagcgaagcaattaaattgtagtcacataagcactgatcatcaatgagctctctgatttgctcacagagtacgaccagagtggaaggttgaacgcagctacatcaataaaatgcagggaattaatgaacacgctagttacttatctccttgtttaagaaactgaacaaatcaatcagtatattcatcgcgtggaatgcgttgttgaaatatttcttcaacactcaaataatatttgcattttatcgttcatcaaaatcatgcctttctccagcaagtgtccttacatcataatcttcacccagttgatcacctcatctttttgctgcctgcaattattgcccgtgttttagatcccgcctattatctcgtgagtgggactccacgtctactcgagtaaacggccatgtccgtgtcagatgttcgattctcgtgcgggttacttcagccggatggctctatggaagccgattggctcgcagcacagctcatcttccctggtagaatttcctacttctaaaagtggctgtatatactccgtagctatctcatgcattaagacctagattggcagaacagcccccagcccctgtttatcagcacaccgctcttcctctcgtcattcttgtgctttatgaagttggttttcttctcctaacagctgttctactgaatctactctattttcaaacatttcgaacgcaaaaccacggctaccagcgatatggattacgaggttgaacaagaaatcgtcgcattcttcgacaagactacgacgactcactcagcctgtgataactaagcgagtgagcatcttggtggaaatgtcactccagtcgacgtgcaaggcgtgtgtagctacaccgtctatgctggccctaacgccggattcgtcgtgcagtatcgtctgaagtccctagcactgaacatggacattatgaatctcgtcaaagccatttacggtaccttgacaccccagatctccttcaagggacagattggggataatcatgagattaaagaaccgctttacatatacgttatgaaccgaatgctaggcatctctcaactggattttatcctagcccataacggtgatgtacctaaaaactcgctcgagttctcccgctagcgccaaaatcttgtggccgacaacgcaaagtgattcatttctacgtgatatatacagaattgctgatcatatgtcttactatgtagattctttgctctattttgaaaaggtcctcaggatgttgatcaaacgtaccgcgagagcctgtgccatcagttcaaacgagacctgaatttgttacttgcttctctccccattcgattccatccattgatcaagaagtctcttgactcgttgccggccatcttttcacttcctttggtgctactacacaatgattttggttccttcaacatgctggtgaacgaaaattcttgcaatctgctcggcatgattgattgggccgaagctgagattgctccattcggcataaatctctacgctcatgatcgtttgataagatccatttgaaacatggctggtccaggtatgatgattatcgccttttggatgagatattctggagcacgtttagtcaagggaccggagtggacaatgaaacaatcaaaaccatcaaagctgcaaggattgctggagtactgttgtggcttggcttcacaagtcgtcttccgaatgagccgaagccagtaccgattcctgatgatgatgaaagtggagcatatggcatgcgtgatttagagcttttgattaatccagctacgaggttcacggacttggtatgataagatgaacgtgtgtctagaatggcggccaagcacaccaagcatgtgtaccagtacggcagccgaaatgggccaaacggaatgcttagtaatacatattatatcatttttaccgctggagttccagcgtttcgcgcaccggggagtcgagtaacgttatgttggtgttcagttcgcatgcgcctccaaggccctcccagcagccaaacatggagtacgtcagtgcgcgctggagaagaggatgcgcggggtgggatcggcatgacagaaaatgtacggcccaatccaaacccttcaaattcaggccgggctgtcacgaagtccgtgagagggatggtgaagtattcgagatgaggagcaacggtataagccatcttgatttgagtagtgctgatgttgtcttaccttccccgccaggcaacccctgagctgttttttttttttttggaaaaaagtgaaaagaggagaataccaactacaaaatcatagaataagatgtaatcttgtgatattgccatttctacacttccctgtaagatttcaatctatgtcgtatgagtcattgtatttcatgatgacaactatagatgtatatatatgttatatacattcaaatcctgaatctattttgattttgatatttttctctcggtagtcccatggcctagaatattaacctagaggtatcacaaaagggtcgctgaagggaatagtttaatagtctgatgtgggcaatatgaatcacagaattgggtgagaatcaaatgtctcagttgaagacaacagtcttatggccgttcaagatcacgcgacgctctgtcacgtacttgacagcagtggcgagtacgttgctctccacgttgctgccggcatgggtcagctccttggggctcatgccgtggttgacccgaacgacattctgttcaatgatcgggccttcatccagatcactagtgacgaaatgagcagtggcaccaatgatcttcacaccgcggtcgtaggcctggtggtagggcttagcacccttgaaagagggtaggaagctgtggtggatgttgataatgcgaccggacatggcggaacatagggttggggacaacacctgcatataccgagccaacacaatcaaatcaacgttgtgttggctcaccaattgcagaatctgggcctcctggtgcgacttggtctccgcggtgacgggaaggtggtggaatgggatgttataggtggccgcgagggtagcaaagtccgggtggttggaaacaattaaaggcacctcaatgctcagctggccggtggattggcggaagagcaggtcgttgaggcagtggccgatctttgagaccatgatcagcacgcggggctttttcgcagtggggttgatctcgaagttgagggagaacgactgcgcagtgggctcgaacgcagtgcgcaatttctcgagttcggggacttcatctcctccacttgcaagcgcaaattgtgtgcgcataaagaagcgctcagaggcaggatcaccgaattgcgacgaatcgataatgttgaggttgttctggacgagaaatgcagtgaccgcgtggacaataccaggacggtcagggccggacagggtcaaaatgaagctaaaagccataataaatgagagaacggtgttgaatccgctgatgttccgttgaatagttaagaggatggagaagaattgtcctggtttcttttcttttttctcttttttttttgtgaatcccactcccaatgttgccggtttcggcgatgactcatctgctgccattgcccgccttcggcttcttcttttgtttactttgcgcccttttgagcttcaatcatcactttgatctatgtgatctcctgtccttgatctacagtatcatttgggctcaggatcgacaacgaaaacatctcagctcgatcattttactcccccatgcgtcggattccatctttctagccaccttttctctcgcgcgacgcaaagccactcggcaacaacattatgcatcgatctcacctacccaggtgtcatgagactagaactgcgttgctgacaggcctgtgctcggcattggttccttgacccccgtgattaaaccaagttatcttcacgacgctaatgcatcccattgcacttccacgagccagcgtgcgcagccaacacaaattaccgagaactggggaaaaggctaccccgtatagaccctagatctgggctacggtagttactattttgtcacggatttaagatttttgtttaatctgggtgtgctaacatctccaagtcgggcgtcctacccagcatggcgttgtctgcctaattcggaggctagccatttagccgccaatgcgtttccatacgatgtgactgtgttgttgggggctatttggcgagccgaataaaatcgtcccttaccaagcgatgggaatgttcacagccatctcattcgcaccaagaagccgcctccacaaaatgataccaactacatccgaagccagtcgcggggggctccctccgtgtccccggagtgtttgtcgtacttctccattgggaagcacgatgaattgtgacccttgctagttcctattagaatataaacggactatgtatctatctgattcttaatttcctcatcaattcacccggcaatcaagacctcatcatggcttccactctctccaatttttacaaagatgccctgctgttggtcgccttgctcagaactgcacaggcacaacaggtgggcacaaacaccgctgaggttcacccatccttgacttggcaaaaatgcaccactggaggcagctgcacttcccaaagtggcaaggttgtcgtcgacgccaactggcgctgggttcacaacactgccggcttcaccaattgctatactggcaacgagtgggatacaactatctgcccggacgatattacttgtgccactaactgcgccctagaaggtgccgactactcgggcacttatggcgttaccaccagtggcagctctttgcggctgaacttcgtcacccaggcatctcagaagaacattggctcacgtctctacctgatggcagatgatagcaagtatgaaatgttccaactgctcaatcaagagttcaccttcaatgtcgatgtctcgaatcttccctgcggcttgaacggtgctctctacttcgtatccatggacgcagatggtggcatggcacgataccctgccaacaaagccggtgctaagtacggcactggttactgtgattcccaatgcccgcgcgaccttaagttcatcaacggccaggccaacgtggaagggtgggagccttcttccaacgacgtcaacgcaggtactggcaactatggttcttgctgtgctgagatggatatttgggaggccaactcgatctccactgcagtcacacctcatccctgcgatgacccaacccagactaggtgcagtggagatgcttgtggtggtacatacagcaatgaccgctatagtggtacttgtgaccctgatggatgtgatttcaacccatatcgcatgggcaaccagtctttctatggcccgagcaagatcgttgataccaagtcccctttcacagtggtgactcagtttatcaccaacgacggtacatccactggcacgctctctgaaatcaagcgcttctatgtacagaatggcaaggttatcccccagtctgtatctaccatcagcgctgttactggcaactctatctccgactcgttctgctctgctcagaaagccgctttcggggacagggacgtatttactcaacatggtggcatggtgggcatgggggctggccttgctgatggcatggttctggtgatgagtctctgggatgaccacgcggccaacatgctgtggctcgacagcacttacccaaccgcctcttcttcgactactccaggtgctgctcgtggtagctgtgacatttattctggccagcctatcgatgttgaagctaacaatgcgggtgcctacgttatctattcaaacatcaaggtcggtcctctcggttcgactttcagctcgaccaactcaagtgggacaaccaccacagtcaccaccagcagcaccaccaccaaggcaaccagcaccaccaccactactacatcaagcaccaccggcgctcctcaatatgcgcagtgcggtggaattaactggaccggtgcaaccacctgtgccagcccgtacacctgccagaagcagagtgattactactcgcaatgcctgtagatattaggcaaccgctagtgtgtagtggtggagactcggaaaatggtgaagataagaaacgattggatcagtttctcacgctctttgttgaattgatggttttggctttgcttgaattcgagagattgattttgcgttcttttaaattgaaatccgtatttgttttctattctccgatctttctccgtatataatatgcaggagctcttaggtataaccatcatatccccgttcattgctttgctgctcgtctttcgacacgcagggcttcaaacaaactttagtcaccaaattgagcatcggcgaaggattattaggaatgaggatgatttattcggctcccttgtgactccagtcaaagtcaacagggatttgtagagcctatttgatccgacgaatgcaatacgtgtacaaaatttggtttatgcattcaatcagcattgcgcactcgagaagcgcctaacgtacaagcgaaatccaaccctgcttaactagtcggagcagcctccggtttccgtatggcttcttcaagatgaacaaggtaacgccacatgcatcagccgggtctgggtatgcggggtattccttgcaggggttatcggcttacattgttcagaaaccagtgctgcagttgcaagcccgtgagatttgtcggataaatgaccggaaacttgggcagtctgacaatcgtcaggctcttggctataggtactgtactgtttgtcggcaatatactcccatatccatggagtactgtaaattgattccattttgctttccagcttttccggtgcctctcgtgtctaagctccttaccccgtcgcctcatatccgaaatgccagccacggagagattgatgccgtgccgaatctggactacatttctctcgtatattagcgattcattcttattctagctcgggtggcggtccgcaaaaagaaatcccaaattgaggcctcgaagacgatccccgcagacctttctcttaagctaaagtgtttccttatacgtaagaacgaagcttcgcagtctaagtcctaggtaggcagggagcttgctccttgtcgttattgttcattgtaaacttgatataaatcctattataactcctgatacattcacactgcgtagcagcctcgacaattccatcacctagtcaagatgcggtttacctctttatttaccataaccggcatcacaggcctgggactagcagtaccagatgcggtggaattaactggaccggtccaaccacctgtgccagtccgtacagctgccaaaagcagagtgaaaactactcgcagtgcctataggtgaagcagtagagcaacaagacatcgggatcagcggtagcttgacgagggttctacattgttgataaaatcaaatgttcatacatacttgtagatctggatggctctggtaactcaatgttgtacagatcgtttgttaggagtctcttcgtgttttgttctacacagcaacattccacttcatctctctctattgcagagtagcaaccagctcatccacggttttcatctcgcgaccgttgttctcgccgacgtccagtgcaaccaaaaaccgactcacacagttataaccggcgatgccagtggtgagctccacgatctcgcggtcatcgtacccgaccgtcttcaattcagcaaaaacagcatcttcaactttaatggtgcgagtcatttggtcggtatagcgtaaaacggcgcgctgttgtggggtgagtgcgctagtctcaagctcggaaatatctccctcggcggtacaaggcagtgtgagagcagcctgcaattgactgggcttgataccacctttgagagccagtggagcgtgggcattccattcgtaaacagcgttattgagtacagcgacacggcagactgccaactccatgacaccagagtcaaccaaagtgcgcgaccgaatagctccgatgaagctgttccagccatcggcgacaggtgggctatggaggagggataggtcaagcgggattaaaggacgggggtttctgcgctccgcgatgcgggcatagatgtcggcggtgtcagggtgcgcatcgacaggcggggtggaaggggcgtaaggcagacgcatggtgcgtgtatgattgattccgagtgatatggggttatgtttgaagatggtgtatctacgctgaaacacgtacattggagtccgttttcaaagtattatgtttttttcaaacctcaacagttcaaacgcgggggcgggaaatgtcttacccgcccacgtgggggagtgtttctccggcatcatataggtcttcgtaggcatcacttcccgattagaaatgtctactccgtactcttcaggcttgtatcgaaatgagaagtcggtttattaatagtaatagatcaggctgagttcatattctcgccgcaaacgagctccaagtcactatgaacagtctcaagagcaatttgcaaagttagtatgttgtacaacagatatacttggacgctaccccggattgcggagggcactcggagctttgaaaacgtggtgggcttagggcttaggtatttcaaaaaattatactcatactcacctggaaccctcaaattatcagagaacaaaataatggcaaacttgatcccaacaccggcactagagtaaaaacatactcccgcagggtgccgcccctcgatgccgatatcccccccgcatgcggataacattgaactttcattatattgaagttttcgccttatacatgatccgttctgttttctctcggccatctgcaatctctcggtcattttctcactcctcaatcgccaatatgaagcatcatttgatggtcggtacctggactgcccccggacgtatctataccgtgcaattcgacgacgatgcccttacgctagagttggtcaaaaataccgagattccagaagccgagcccatctcatggatgactttttctcacgataagaaggcgatatatggcgcggctatgaagaagtggaacagtttcgctgtcaacagcccaacagagatcattcaccaagtgtcgcacccggtggctggtcaccgtatgtctacggagtcaatggaatacatgtccaatttaccctcgctaactctttcttttgtttcgcgctagctctggctcccagcagcgagaccaacactcgtgctatcttcgtgcttgccgcccacaagcctccctacaatgtttacggcaaccctttctacaactacgccggttacggtaacgtgttttctgtgaagcccgacggaagtctggatagcaatatccagaactacgaatatgtccccaacactggtatccacggcatggtgttcgaccccacggagacgtacttgtactccgccgatctcacggcgaataagatttggacgcacatcaaggaccccaagacgggcgaattgacactggtggattgcctcgaggctcctgatgccggcgaccacccccgctgggtcgagatgcacccgagcggcaagtacctgtacgcgctgatggaggcgggcaatcggctggcagtctacgtgatcgatgagcgcacccacaagccagtattcactcacatcacgtatcccttactgccttccggtgagtttcgacaaatgcgaccgatgttgatggtaacaactaactcattaggcctccccccgcgtaacaagtatcgtggagatgtcactttttgcaccaagggtggagagtaccttttcgcgactactcggtcaaaccatttcgatgtgactggctacatcaccgcgttcaagctcggctcgcatggcgagatcgagcgccagctctttatcaacccgacctcgaccagtggtggccactccaacgccgtcagcccctgtgacttcagtgacgagtggcttgcgctgtgcgatgaccagcttgggtttgttgagatgtaccgctggcgtgatgagaagttggcacgcgtcgcgcgggtggatatccccgaacaaggatttggtatgaatgccatctggtatgattgaacgaagaaattagaataaatgaagatcaacatgtagagcaaaagattatgtacagtacacaaaatagattggtgtaaaaaaagacaaaaagccgaaagggaaatatcgtcggcagtcaagttcgggttctgctttcacccggatgagggcgcaattcgagtgccgatgttctttatgttctggggatcctcttttttcgcattttcgcatctttggctcctttctctgtattgtctattctggatttcctttagctcttcatcatgcctactcccggtcttctctacgtgacaatgcagcccaagggctcgctaccggacacccagttccacgactggtataacactgaacatgggcctctgcgtctgcgattgccctttgtcactaatggctttcgtttccgtgccacagatggagaacagcctgaatatgtggctttgtacgatattaccgacatggacgagttgacccgcaagacctacttggatctgagaaccgatatgatcaagactgagcgggagaagaagactatggcccaaattgatgtcggccgtttactgtatgatctagtggatgagcgcagcaacccgaacttccgcccgctagaagatcaagccgatacggatgccgagacccggggtagcgtcctcgtcgccgtccgagttgccactcaccccgaccccgccaaagaagctgacctggataaatggtaccgcgaggaacattttgagatgctctctcgtgtgcctggatggcgccggagtcgccgttttgtcactgcggcgatcgattccgccgccccgcgcgaatcgctgactctccacgagtatgcccccgtcaatggtcttggaggtgaggcccacaaggccgccatgaataccccatggggatcgcgtctcatgagcgaggtggtcacatctaagaagcgtcgcgtatatgagtggtactacaccttcggccctgctccccgtgagctcacttcgctagctgccccagatgtcgttggtccctggagctccaatgatggccgtactcgcacatttccctcgaccacccgcccagctgtcgagtcgttcatcactacttctgatggggttgagatcccctacaggctggagggtagcagagacccctacgcgcctgtcgtcgttctgagcaactccatcctagtcaactggaacatatgggatcgtttccttgacgccttctttgctcagcaacagaatcagcgttaccgtgtcgtgcgctatttgactagaggccgacgctcgcagagtggtgagcagcctgtcaatatcgatttactggcctctgatctggctacgttgctggaggctttgcgtgtgcctcccaaggccgctcgtttgattggtgtcagcctgggtggtgtgaccgtattgaacactgctctccttcacccggagcgcgttggagctttcatcgcatgcgacaccaactcctccgcacccgaatccaaccgtaaggcatggggtgaccgcgtggctatctgcgagaaggaaggctctaccgatccagacaccaatgagcccattgttggcgaagagttagccgaggtaaccacccgtcgctggttcgtgccggaatcataccaggcccagcccgaggtccttgcgcctgtcaaggaggctgtgcgcaccaacagcttgaagggatttgcccatagcgtgcaggccctctgtgcctacgatatccgtgagcgcatggctgctgccactgtgccaggcctgttcatcgctggagccaatgacggtgtcctacctcagacaatgcagaagatggcagcagatctacatggtggcgccgaactgaagctcatcgaccgtgccggccatctacccatggtagagcagcctgtggcattcgagaaagttgtgactgagttcctcgggaaaattgatggttgattgcatttctataggtcatgtgtagatagattttgttcgggcgtatgcaaggaaatgactgatgaatatgttgactgaaccttcgccagtgagacatgactgtatcttcccttcaagtgcgtgcttgtatagagtattgttcgactgatcaaatcataacttcggatccaccaatgtgtatgtacgggcatgtgcgtcagatgatctccgggcttccgttgtatggtaaaagcctgaatatattgtccagaggatgaggatgcttatgcgggagggaagggtgaccggaggctgggtgtctttcgaagtacctcaatgaatattcagtagaccgaggtccaaatgtcaagaaaaatctcaactatgagctgtatcacagagcattgttgagcacaatcgtaaagaggagaagacgaaatgatgagaagaaaaagttgcagagctgaacagttcggcagacgaaggcggccaagggtgaaattcagcttgcggggggaaacgtcacacttctccttgacgcgcacttttctacacgttcttcttctccgctctctttcactgtttcttcaattattcctttctatcatgcctgagagcaagattcctcaaccgggtcctgccaaactgaagcgcaatgcgggccctgacgagtggctggaggcagcgaaggattgcaagtatctatcggagccacatatgaagcaactgtgtgagattgtcaaagaatacatgatggagggcaagtgctattcaacctgaactcagttctattattctaacattgttcgcagaatcaaatatccaaccagtatcgacacctgtcacagtctgtggtgacattcacggccaattttacgatctcctggaactctttcgagtttctggaggcatgcctgatggtacagaactcgatccgccgaagacatccccctccgtgattacctcggccgatatcgaacctccctcaagcatctcagatcctaaaattcgcaagaagcttcgcggctccaacatgaactccaacgacgaggaagattcgagttcacggagccgatcggccagcggtacatctgcagatctccagcttaaccgcaactttgtatttctaggcgactacgtggaccgtggatacttcagtcttgagacattaacgctcttactctgtctcaaagcgaagtaggtcgcacatggcacctcctggcgggtacgtgttcactgctgactcaatatcctagataccccgatcgagtcacactggttcgtggtaatcacgagtcgcgccaaattactcaggtatacggtttctacgaagaatgcttccaaaaatacggcagtgcttcagtatggaaggcatgctgccaggttttcgatttcatgacattgggggctattattgatggcaaggtgttgtgtgttcacggtggcctgagccctgaaattcgcacattggatcaagtccgcgtggtagcccgtgcacaggagatccctcacgaaggtgccttctgtgatctcgtgtggtctgatccagacgatgtggagacgtgggctgtcagtcctcggggagcaggtgagaatcatctaggtctttcttgaacacgcagctaacaattttaggatggttattcggagacagagtggccgatgagttctgccatgtcaatgatctctcgctgatcgcacgcgctcatcagctagtgaacgagggctataaataccactttaacaaccaaaatgttgtcaccgtgtggagtgcgccgaattactgctaccgatgcggaaacctggcctcggtctgtgaaatcggagaggatctcaaacccaccttcaagctgtttagtgcagtcagcgatgaccagcggcatgttccagtctcgcggccagggcgcagcgagtactttttgtaagatgcgatgcgagttctgcaccggcgctggcgttcggtttgatatttgggcggcaggataagcattatataatgatttagaccagacttaatgatgcatacgccttgtgtttatgagaaaccaaaagggatcatctcaagctctagagatctgaatagagaaccggcgttccgaaaacttgatatcccttgaagagcaaccccgatcaacctctccccgcgctccatactatgggaagcaacgacatggggtaaattaaaacaagggttcgcaatatcaacacggcagtcaccaggggattgactgccgaggcttctcgtccagagcgattgtcccgcaattgcctgccggggcgaatcccgagatccgggggatctctcccaggtgcaccataaaagatcctagatatatgcactcgctaagtgcatttgatctcaatctgcgcgcacttatacaatggagaaagtcgatgttctcatttgcggcagcgggtctgccggtctttgcgctgccacttggctcgccaagtatggggtgcggtgcaaggtactagaacggcgggatggtcccatgaagatgggccaagctgacggggtacaatgccgcaccgtggaaatttttgaaagcttcggaattggggaggagcttcttcgtgaggcttaccacgttctagaggtcaacttctgggccgacaatggcacaggcgccatcgagcggacaggctggacggcggatacccagccgggtctatcacaccaacctcacgttattttgaatcaggcacgtatcaacgggctcctcatagacctaatgcagaaatataatgatcaacaaatcgactatggctataatgtgaccaatgtcaaagttgatagcaccttcgctgaggatcatgatgcctatcctgtcaaagtcactgcggaaaaggatggaaagacagaaatctttgcagccaaatatgcattggtaggtgctcattatctttggggtctagacgttttctgacccgaccatcaggcttgtgatggggcacacagcattgtccgcaaagccctcgggtataaaatgatcggagacagcagcgacgctgtctggggtgtcatggacatggtgccccgaacggatttcccggacattcgcaagaagtctactattcgctcgaaatcagggaatgtcttgattattccccgtgaaggcgatagcgataacctgacaaggttctatattgaacttgctccaggaaccaacccgaaagaggtgactctaaataatttgcaggcccaagcacagagcatcttccacccttacaaggtagaatttgtggaaacgatttggtggtctgcatatgccatcggccagcgtcatgccgatttctttcacaaggatcaccgggtctttctcgctggtgatgcttgccacacccactctccgaaagccggccaaggtatgaatgtcagcttacaggatggctacaatattggctggaagctcggggaggttttgactggtctagctagtccctcgcttctagagacttacgttatagaacgtcaaaaggtggccgttgatctgattaactttgaccgttacttttccaatttgttttcttctggggcctcaacatctcctgccgagttccaggaaggcttcatcaagtctggcaaatatacagcaggtttaacagccaagtatgaggtgtcgtccattacatcttcattggaatcgaccaacctcgcttctaacgtggccgttggtatgcggatgcccagcgcgcaggtcgtgcgattctgtgactccaaacctctacatctcatgaaatctctcaagtcagatggccggtggcgtatcatggctttcgtgggtgacctgactgtaccagaaaaccacacaaagctcaaccaggtatgttggtcacttccgaaatgtacttaagccttatctaacgtatcgtatagctgggagaatacctgaccgtggcggatgggcccatccagacattcactcctgaggatcaagacattgacagcctgatcgagactattttgatcgggtatggaaatcgtcatggtattgagttggagcaaatcccggaatgcttttatccagtctctgggaaataccaaacaagaggtgcatattctctaatatcttatggtcccatcattcctaacccagagtatttagatctacacaagatttattacgacgacgagagttacaacaatgggcacggccatgcatacgagtatctcggcattgatgcggcacagggtgctcttatcattgttcggccggaccaatgtaagcaaatccgtaatcgtgagataactagatacaactgacgctttcaaatcgatagatgtttctgctattattggtctaagcgattattctgaaatcggcaacttctttgctgggtttctccaacgtcaaacgtacgttgcgaaggatacgaaggacacacctaaataacatgtacagtagggccatgaattccagctgtcaggcgtccagcccaattgcagacatcatggagaaacatggttaggttgaaataaatgggaatttgagtggagtttgcaaactttgaatatcattaatgtgctcaattttcctgcggagggtattgtgattcaaaggtcggtctatatcgaagctgcttgaaatccgtacaaattgcatgtgtcaggctatccttaccaatggggcagactatctagtcctatttgtgtagttgccctcggtctccgacacctatcatccgatttttatcctgatctcacgccgagctcacgttacattgagagtcactcatgtcttccaattcaatctagacttattccctccgggcttaacaaatcttcggagtaaatgttattataaacgtcgatattaaaacctttttatatcaaatttcccttttcgttttggtactcggaacagtttcctaaacactaagccggactttcactatggaggtttctgttgtcatgtttgctgctattctactggccacgtctatcatcgcatctcctctctcctctcggctacagacagacggtgagatactgcgatcttcccaagctctgcgccgcacgatccagcctcataaaccaggcaccttagaagtgctggatctgaaccaaacgtcccacgagacttacagctccaactgggccggcgctatcctcattggtaccagatacactgcggtatccggagagatcacagttcctgtcccccaacttccaaatggtgctgatccttatacaaattactgcgcctctgcatggattatcatcgacggcgatacttgcagaacagccattctaaaagctggaatcgatttctgtatccaaggaggcctctgttcatatagcgcgtggtacgaatggtatccagactacgcccatgactttagcaacatccaaatttcggctgaaaatgtgatcaaaatgacagtcgatgcaacttcgaagagttccggctttgcgactatcgaaaatctatccacaggcgtatctgtgacgcatatattccccaatagccttggcggtgacctctgcgagtccaacgccgaatggattgtggaggatttttctgtaaagaacgcattggctcttttcgccaacttcggcactgtagtattctccaatgcagttgctttgcgcggtgggataagttacggaccatcgggtgctcccatcatggacatctatcaggatcgaatcctcacatctacttctgtcaacgacaacactgtcaatatcagttatatctagttctgacaatctctagaacaatccggtggaacattgaaattttataacagaaatgaaatagaagttgcctacaatgacctcggcataaaaattacatcgtgctttctatgcaatgtatgtccatcccgctctagtaactcttatcaaacggttcacggatatcaagaacgtgggcagcttttccctgcagacatatctaactactgactgacgcgatattaggaatattcatgtattaacaccaatatggagagaagaagccagctttcttcgattaaaaaatggcatttacctgtgataaccgaaaagagggagattggggacacacaaagcaaacccatcgcataatttattatttaaaagttggatagattattgttgtccccatttcttgctaatttggctaggtttaaaacaataggtgacatcgaattctgccattaaactagaaatgttgtatcatggtcgcacaagtctatccagacgaaagagtcgaccttttaggatcatctggcatttgtattccatgaaatcgccagagagcatcacatatcacatcgtaacaagccccgtatcgcacaaccttcattgtgctaaaatcgatcatggttgaagaggctcgtggatggtgaaacttttgtgtcccataatcaacgactatatctgccacctcgaggatttccggctcaatgccctctaccacagtctttgttccctttccgctgatattggccgaagatcccatcagaggaagttcctctatagcagcaagtcgagataattcttctagcaaaccacccccgttggctaacattgctaaagtgtccccagcaacgctctgtgctaatgcgtttggcggaattttttggataatcggatggtcagcgcgatatggtgcaatgattcctagaggaaggtccaagtccacggtcaagagtttgaccataccggcttctttggggggaagaacatgaatatctcgatgcagattgtagcttccgaccattgcatgtcgcttgtgtggttcccgccgttgatcgcgatgatcccgtagccaacgctcatcggaataatcgcaataccaccccgtttcagaacttcgaacaccgctctggcatcttcttttgggctcggtactttatagaaagacatgatcattgtatgaaagatttgatgtatttgggcatcagagcttcattctagtcatgacaagtggattaaatctcatttaacaatatgtccaataccgagggaaccgagatatgtaacacaaaacacaggaactcatgtgaatgaaagtgtaaataatctggcttgatctcattcccgagtgacacctgcaatactactcttttgcttcaggtatcaaggagccagctcattcaatgttcacagaggactcgttggaaaggaaatcccctcgattggcaccttcgttatctctgagttgggatgtagtcacattggataattcagttggccacaccgcatgccaagttccctgtgcacgaacagaatattcatgtcccttttcgaggcctggaatcggcaaattcacagttacatcaaggctgtgtcgcgcttgtatctcaacgagatcatcctcggaggcaggtagcttgcgtgataccataatagtagggatgggcagtttccgttgggccgttgtgtcacaaatctggaagacaccgagaacaccagcctgagggtccaatggactgccccatcttagaatggtgactggtgtatctgcggcattgtgaacagaaactttgattggtagagcaaatgaatcttgtgcttcggagattggtgcctgaagggccacggtgacctgtaaactcaagtttgacatagttgcgaaaaagtcgtttccgtgatcaaggtgcgaggagaataatagaatagacagccggcaagttaccagtagtatcgcgggccttgggttgttgaaagaccagaggagagaatcttatcacgccttatatctggaattgttgataatgttattgatctctcatttcaaccaatcaaacctgttaattctatgccaagccgactgggcaggccgctccgcattcctccggggctcccgtgcaatacactcctttctcgtagacttggcaccgcttctcgtcccaaacgggcccttcatcacgatagccaagcctctatgatgttaccccaaatagctgacactaagcactatttctgaagtcaagacttcggcgccgtcttgggtcgtatcttggcactgtcttggcaccggagtccggagacaaacgcacggtctggggcttggcgtggtttccggatcgttcagaatgatatgagctgagctgttacctagtaggttgtatcattatcataggcaatttgtgttgatgttcctatcgtacaatgtctttgtgtctcacaaatctaacaatggtggtgtacatatatttgtggtatattcccccacggaatgatcttactttcaaaagttaataccttagtttgtctatatatatctcaaacacaaaggtttacatagagacttgcaacttttaacgccaagtctttctttgtctagaaccgatcgtgaggagttacatcgagcaagccctcgcctgttgaagcatgatgtgggatcaaattgcagtttcataggctttcagacatacgatccatccttcaggggaacggatttccgtcgggccaaggacaacatctatgatgatcttctgaagatgcagctgtctcaatatatctctaaccagtgacaagattgcggacggcctgcccccgggatgttgttatctcacgatacattcgaccagtgacaagattgctcgcaagtctcccgtgtccatcctatgcaagcgtggcttctggcgtgatcagattgtttcatgcagagaggtaaccaccctgtttcttccgccatccttctgggcaacgcggggagatggaaggtgtacaggagagaggagaccgcggcattccattcaaaacggcatcatgtgtccagtggctataaagcaggcgttcttttcttcagaattgaatctttcttattccagcagcatccaagatatcagacttacaacttcatcttcttttagtgaatcaaccttttgacatccgagcatcatgcgttttactgccctttccacggtacttctggctctagcacagcatgtgcatgccttgccagtcaaaaccaacgagacttctgctctcgatatcaccttgagtcgtgtcactgacacccgtatcaaggctgtcgtgaagaactctggcagcgaagatgtcacatttgtgcatctcaacttcttccgtgacaccgcaccggtaaagaaggttaatgtcttcaagaacggtatatgaaatttctccagaccttatcagtttaaagctaatttaatatcagatgctgaaatcacttttgagggaatcaagcgccggttcgccctcgagggtctcgctgaggaatccctcacctccctcgctgcaggagagaccttcgaagatgaatttgacattgccgctaccagtgacttgtctagtggaggcccattgactcttcgttccactggcctcgtgcccctggtcactgatggtacagtcactggatatctgccataccgttccaatgatctgaagatcgaggttgacggtgtcaaggcatcccgagtgctgaaggctatcaagccgctagatcgccgtgctcttcaaacttgcagtaatgcaagcaagaagtctgcacttgccaatgctcttaagaacaccgtgacgctcgcaagcaatgctgcagaggctgccctttctggatcttccactaagtatgtgcataccgttctactaccaattaatcattctaatagcctcccataggttcaatgagtacttcaagactaccagcaccgctacacgcaatgtcgtggctgctcgccttcgggctgtggcaaaagaggccggctcggtgactgccactaagtactactgcgaagataccttgggatagtcagtaccccctttcgataaaaacttgacgtgcatatgactaacaaatgtaatacaaatagctgcgaaaccaatgtcttggcttacactctgccatctcaaaatgtgatcgccaattgtgatatctactacagcaagctcccagcattgactagcacatgccacagccaagaccaagcaaccacaactctccacgagctcacccatgctcctggcgtgtacagcccgggaaccgaagataacggatacggatacagcgccgcgacagccctcactagcgcaaaagctgtgttgaacgctgactcgtatgcactgtatgccaatggttagtgttcgatgttgagtccgtttgaagaaaatcagctaatcagcaaacagcaatcgcccttggctgctgaatggtcaattctccgtacaattgctcccgggggtgacgtacgaagaaccgggatcaatttgagttcgccagataccaagttggatacatgttctgatgaggtttgcaaagagagactagttgtggcaggatattggttgagaatataaatctgcagtgatgataaatatcttcgccttgttgtaatgtaaacatagtccattgcttgaaaggccgtactacacgcgtacacagatcgggacggttcctgagttcaggactttcttggccttattcctaccactaatgattactttgcggatatacaagtcttcggcggcagactcgcactctctatcataatattaagattcaaggtacaaagcatcacctagtggttattttctgtcacatgagaaaagacctatgtcgactgcgctaaattggagaaatttcacccagagtgcattcaggtccataatacacgatagtagcatcactttgaggaattagtaattaaacgaacccaaagtgctttaaaggactagtcctccacaggcaatgcaccctcagcctgcatctcgagcgccacctcgtcaaccttcttccatacccttaatagatttcctcctgccaccttacttgcatcattgtcactcactcctcgtttgagcagctccttaatcagatgcgggaacctggacacatcctccaatccccgaggaaccgtcggaataccatcaaaatcactacctattccaacatgttcgaaacctataagattcccaatgtgcaggatatgatcagcaactcgttccagagtggcgtgagcagggtcctcgtctgggatcccatcggcgcggtcagaagccgtgcaggaaatgaagtctggtgcaaaattgaccataaccagggagttcttctcacggaccagctccaagatgtcgtcgggtacgtttcgcgggtggggacagatcgaataggctgagctatggctgtaaatcactggagcacggctccctatccactcggacttgccggcgcccagcacatcacgcatggtctccgtgctgacatgagctaaatcgacgatcattccaaggcggttcatctcaaaaaccagcttctggccttcttcgctgacgccatgccagagaggatcggacttttttattccaccgtctggaagttcgagaatggcggcgtcggcatatcgattatggcaattatgcgtcagagttgcgtacgaaacccccagctcatagaagatccggagatgcgccagtgagttgccgatcgaatgtaagccttcgataccaagcggtgagatgatctttccctcgcggaaagcggacatggcagtggtaccattggggggcttcgagaaaaccgtgggatatgcttgttgaactctcgacatgatatccacctgctccatagtctcacgcacgcctatcattctgatgtgagtatgtgtgcgaaatccatcgtaccaaattctcttacttgatgcataattctcgtcggagaaatcggtcccattcttgggacaggggacgaaaacactccaaaatgtaccaccaactctaccttgttttaatcgggggatatcaacgtgaccaggaaatttgccgttgacaaaagcctcagtgaaattgcgatcatttacgcggttatggaagagttcccgaaccaggatgggaaggtcatcatgcccgtctgttttaggctatcagtcagagttattcccacggtttttatctatccaatctccataccgatcaatggagtctgagacaggatcttctgcaccctttcctcaatgctcagggggagtaaaggagagcgcaacagtgtgaaccaggcggtggctacaatgatagagagaaacaaccaaagtatcttgaagggatggttcttctgcttcaaagttggcgcatctgcttggctctccaagacgaggctcttctcttcgctcattgtggacatctagagtgttacgaggtcgaagagcggagatgcttatcgataaggctggcttagcctcggcacgacctcggagtcttcatgctagtcgatagttcatgacaagatcagccacaaaaagttcataaagagtagataggtaatttcggtggactcaagtgatatatatttgtatgtatgtgtgcatcaaggttgtatatatgttggtgtgagtgcctaagcggcctccagggctaggcacgtgcacataacggtgctgactgaccagttaggcggtgagaactcgggtttaatctattcacaccgccttcaacccgtagatgccccggtagattatcaacttagacgagtaggctggccgggtcccttgtttaacatcctttgggatttccaggacttcattttagggaagataaacataatctcagttctccatatcgcaaaggcttgccataatgcagcctggcaagaccaccgccggtctactcccaattccggcagcagctacgcaaaagtcgggctctggagcgcccgcaaggaaaacgcctaagcctcctgctccacgtctcaaacttctcattcgacgtttgccacccgggctaacacaggccgagctggagagtgctcttggggaccagtggaaggctggagcagggaacgttgactggcttcagtacaaacctggcaaggtgtcgaaagagtaagattcaccttcctctgatgcaaaagcgtatttatttcgactggctgacgggacttcttcaaatagccccaacaaaccgtctcgcccgtcaagagcatacatacacgtcgtgtccaccgaatgtgtctctttgctctcggacgctgtgcgccaggcttctttccaggatgcccgtaacactctacacgaccccattttgctggggcctccgtcgctggagtttgcaccttatgccaagacccccggaagccgctcgcgcaaggatgctcgtcaaggcacgattgatcaagattcagacttcatcgctttcttagaaagcctgacccagcccattaccaggcctgtggctgtggattctacacccgatggcgaggacaagaagaagcaagccgtaatgaccaccccgctggtacagttcatcaaagacaagaaagccagcaagttaaaggacggcagtgggtccaaatctaaacacagtcggtcggacaaggaatcaaagcaggagaaggtacaagcaaagaaacttctacaacgaggcgataaggaaccctcggcaaactcttccgacaagaaacccaaaggagaaaagacaagcaaagactctgtcaaagcaaccaaacaaggagccgctgccaatgccaagggaggcaagtcgagtacgacatcaaacgctacaaaggatacagccgcggctccagagcggaagagagagcgcggaaatgtcacagcagccaccaagattcttcagcgtgatcttggactatcgacatctggtgggcgacgacgcgggaaaggtacttcgactgatactgcgtcacctaagaacgagagctctcgagactcggctattccatcagccgatctgtccaaggaaacaaccaggcctcctaaaaccgcatcatcctcaaccaatgctccaaagcccaaggacagcgagtcatcctcgcgacccgatgcggctccaccgccacctgcaaccttaccagccaagtccactaaagctggcaaatccaagcacccatcaactgctaaacaagcattcctcaagcacgccaatccatcccagggtgtgaccgaggcacttctgcagtctgcattcaccccatttggagcagtgacgaaggtcgagattgacaagaagaagggattcggatacatagattttgctgaaccggaagcacttcgcaaggccatcgctgctagtcccgtatcggtggcccagagccaagtggtggtcttggagcggaaagagaaccccggaatcgaaaagtctcggaagggacgtgaggggttcactgccaacaagacgaaggctcccacggaagcttctgggagcacttcaggtgctggcggtcatgtaactggaggtaacgctggctcctcccgcggatctcgtggagggcgtggatcacggaataagggacccaagagtggagcttcagagaaaactggaggcaccgaggcggagtgagggcagggcctacacattgagttctttagcaattcacgagacatgataccagacggcatgacaggttttaccgacaactacataatggccgcggcaaagcatttgatttgatagactatacataaccaattcattgaaccaggcaataccaatatttcgatgtccgaaaggatgtcgcagggttatgaaaccgatgaagaggtaaggttgaagcagaagaaccgtccgagacatcacaaaactaggttcgaccagtactgtcaacagacaaagcagcgagcggtctacaacgtcttgaggaaaaaagtacgaacaggtttgaatctaaatgactgaaaaaaatgaatgtaattttttgctatgtgcatgaaccccccacagctcaacataccatctaccaagaaggaagaggacctttcagacctcctcgacacccaccaggaccgaccgaccgaaatcagacgtcgagaccaggtcaagatcatcaccactccctagaccgaaacacagacactgcgaacagcacgcgtgacagtcgaggcgggagtaaaaaggtttcactttagggcatcgaggacatgtagtcatcagcaagggtggagattctgtggctcttttaaagagtttagaaaggggacgtctactctaaagtgattctttgaactgtgaaaaggtcagcaaaatgttcgatcacagtgaaaaaatggttttctgctgtatgggggggaagaacatacgtagagtcgcttgaaaaagagaagaaggtctgggggcttgggcttctttatattcctgccgggcacgctagtgctaagcgagattgtcgtgtatttgtctggtttgtctggtttgcttggtttggctgttctccggtgggtcgtcctgtccaatcattttcttagggcggatccttcattgaaattttcaacttcagcgttcttctactcgtctgtatcattttgcattacttgattatttgtcatttctctaattctatgtgtcactcaatatttcctatctattcaaaatacgtaataacagaacctcaagaagtacgccgtacatgaccatccttctcccgaggtcgggccgcggacgcttatcgcttatcgcttatcgcttatccttgtatgcggggatctcatccaaccccagacccgtggacttgtagactcttcaagcatgccacgccccaaggtccatccagcgaatcggctgcgagcgaacactgcatgcactgcctgtcgtgcatccaaaaagcgctgcagtggttatttcccatgcaccaactgtatccataaaggatgtggccgctcatgcaccccattcaagtccttatcacacgcaggcctccgaagccctctcgtacctgcttcacgacccacagttgaggcgcctcggacacggaggggggtgtcagtggagtcgcaaagcctcctgacgtcacagtctcatgacattggtacgccccgtgtcgagcctgacacgcccgaagtgggatcgcactcgcctgaagttacgcatcggacacatccacgcatgctccgcaacctgcaaggggaacgaggtatgaacgtttgcgaccgccatgcatatcatttgattgacactgtccgcagtgtacgtcgggaaggccgcctctctatcattcctacaattgcttcgggatacagtgacccaacatattgggccctcgcagttctctcataatggggcaagtgaggatatgttagagacagaagctcatcatgatctgttgaatttctctggagaatgttgcactgttgctgagaaggagcgatttatccagaattaccacgcagcggtaggccgaataccaatcatgaagggtagatgacttactgacagtatgaaagacgagcggatttttcaatttgagctttagtgacgacgtttcatcctcattcattgacccagcagagcccaaaaccgatcgggaaaagactagggcagccatcatggaccttatggttgctatcggagcacagtcctctccgaatgaccgagaattccttcaggtggagcggttctacttttctcgcggtcaacgtaggacatttgccaacatgttggaagatcctagcgtggatttagtccgagtgtttctactcatgtccttctatatgctgggcgcatgccgtcgtaacactgcattcatgtacctgggagtggcttcaagagcagcagtggcgcttgggtttcatgcggaattttcaggttcaataagccccgatgagagtggtgagagaaatgaacggtaaaagcttctcgcaagatcttctttggcccagctaatctcaaatagatcacgattgtggatgagcttatgtattctcgatttgcttgtcagttcgatcctcgggagaccttctgctatatcacctctattacccgagaatcgacagggacctagttggggggccgcaccgagtgatcctggcctggtggcctcatatcagctgtcgttgatcctcgataaaatcataaactgcctttacagtgataaggccgcatccgcacaacaggcagacctgctattatgcaaattaaacggctggggtgaatatttgccgagttcattaaggacgtcgtctttaggacatcaagaccagagtactttccaagagcatacaattggaaacatgcacgttgcatgttcatatcattttgctgtgatcttagtcacccgacctttcctcgtctcggctttaagtgtccggctggcccggttacatcagagtctgtcgaccggtgatcccagtgaggtgcctgaggaggacccagcccactctcgtctcgcagcggcatgtattgattctgctgtatacatgctccaaacatgtctagaggttcataagtccggcctcctccttcggaatatgtgtattctcaagttagtctgcgtgtatatttatctagtaactccaatactaatctcaaacagagcgtttatctttgccgcagcccttgtactcgggttctctatgttctctcaccgtgacgtcgattctgagattgatgaggtattctgcggtgccctgaccatcttacgcatgctggcgccgcagtctgcccaggcagctcactacctagagataataacaaaactcgaggccgccataagcaaacagcgccagcaactcgctacccaagcccgacagcgacggagtcaatacgtcagtcggatatttagcatgaacgacagcccggcaacaccgcggacaccaagtgaggggaacgaagaagaagcaaatacgaccccgcatctatcgcagagtgtcacatcaaatgggtggttagattcaaacgacagcgcagctgctgtgtcacctcccatgattgaggggactttattcgactgggagggtatgaatttaccattatgggatagttttccattcctcgcggaatcgactacgatctaatgaaatatactacacttgaattataggtttagttgactaggacttgagatgtcgatcaattttcttctaaacggacgacttcacggtcggaaccaagaatccagaaggataaaggttcgaagtgtcccagtagagctggtaaatatcgtcgacatccgtagccttcagacggaacgaatcgtgcagaagtccattctcattttgccacatgagatacctgccatagaaaagaaattgatctaccttcgcatcgtccggtgtatcatcgtccccagtgaagcccacaggtagcaccttattaggcgtgggacggatgtagaagaatgtgtcagattcaaaggtgtaatccttgttggtggccgtggcgatgatctgggagttattgaagacaactaatagagtatgagccgttgcctggttaaaagaaaagcgcaaatgcaaatgagataaaagagaaatatcatacatgtaacatcggttgtcaccgatccagacacccactgagacgaatcgccgacatatgcgagtcctaggtatcgggtcagatgggagtcagactcataggggaatttataataaccatccgaataaaagactttcactccgtcggatgcgacaccgtaggcaagaatggagaaggatcctgttggatagcgcttttgcagctccgattcagagggtgcagctataacttgcaaggccaaagccagactgatcggtagaatattcaatctcattttttgttttcgatgatgattctggagagaagatcatttagatatcagcgctgggtgtgcggttgggcagttataatgtcttattgtcagacaattaaccagtgaccagagacaacctggaaacagactagggtgacgcgtcagatgcacttgacggctgctacttggattaactgcgtaataatagggtttaatatatgaagggagtcgatttgatttggacctgatcagaatctaattaatatagaaaccagtggcattactacatgcaatatgaactggaagccactacaaataacccccggtctcggtgtcagccgaacaatggcaagtaagcaaggtcttctgcattgtaacccctctacctgatgacttctcattggtaactgaggaaccaatgtcaatgtggcttatttcttggcatgatcattgaagtcgaaggggaaatggttcaataaggccaattccccggttacgagtaatcaaagccaacggcgagctcgttgagctgcctcaaccgttccataccaattgctaggaggtggaggcggcagctcattgttatccctctaagcttgtaccattcactgacagctcacaccttccagccttggaaataatacgcttaaggggcagttcatgtttggcaggttcgacttgatgtatttgcactcgatatctcatcaaattgctatgttctacttgagcatctatatcattcgccatacaaccctgcaaaaaaggacaattgaagtgccaacgtaactcaagttctactagtatttgccacttgcgaggtcagcttagggtatctcaagagttaagcttactcggagcttctacattagtcgtatgttgagattattatagtcattgctttgcctatattgcttagttcaaaaagatatgtctcttaaaaccaacactctcaattgccttaaactcagacgaagctcatgtatctactattcctagattacaaaggaaaacaattaaccctactaactacataactacaacaacaatatactcacaaggaacgacatgaattgaatctgtgcagacaacgagaaccgcccattaaacgtatttacccaacacagcagcggaatgagatatcaaaaatgagatgtcaagacagaatgcaacaaggcttagacattggattcagaggagcttagtgagtgatagatatgaaatgggcccagagatgaccgtgaggaacgatgtgctagaaggacaggagaataatgagggaaaatgtaaatgaaatgaaagaacagaacagtccggttacccacgctcccaataatactcaatgacaatgacaatgactcagatgcacacgatgcagaaaaaaaagagaacagagttgaaaagaaatgacggcagagaacaagtgggaaatatgcaccgccataccgattagattggtcggaggaacattcattagatcaacacctaagacaagatcctcgaggtgggagggaatatcttgagtttaggatggacaggcgctgctagcgcctgtctagaccaccgagccttttcgagaatgtcgtttttttggattggcggaatatccaccggaagcacattgtatcggtcaaattgctctgaatagagcatacaccaatccataggatcaattgtgatccacgcggacagcacagcttctgttcatgcgatgaaaaaaaaaaaaatcatgaaacaccttattgcgccggaatcgatgcatgtctagacaagaatgcaggctcggtggatatggacctgaccaatatggccagacacaggtcactgagcgatgcaagaaactcccgcccaaaacttaaatgaaatgcgtgtagatcttggaattctcatgaacttccatctcctgtattaatgttagtaatggcacaatcgaagtatagaacaatgcaagtaactcaccatcttgaagttattaatctcctcccgaatctgttgagcaagcaacggggtgagacggttgcaagtcgcaatctctccacgtcgatcgtactcgccgctaggccaggtttcgtggaactggatgcgaggactgaagacgatatttctaccagcaacatttgacggggtgatgggcgcactcttcgcttcagaagacgagaaccgcgccgagaggaaatagtcctcgccggcaatctttaccggatcattttggtgagctggggatcgtgacgactcgtcgggtgtgggaggagcactagagtgcggtgaatcactaccggggagtgcatgtgcaggcgaggagacaccgaaatccgagtgagtttctaataaggtcagtatgctaaaatgtcaagtgtatttgtgtggagatacgcactcttcaagatacccttgcggacggccgccaggatctccgcccgttctcggtctcctcccatgatgctcttacgcgactgagagttctccgatgcggctctttcccgaatggaaacggatcgtctgacctccgatgcattgtcaaccttagggaagacagtagccccacggggcaaatctgcggggtcggggttgacagcgacacgctcccgttctgcctcaacgttcaccacggtgatctgcggggctggaatttcggggatcgcaccctccatggaattgatgctggccacggatttaggacggaacatgccaaccaatgagcgagtggagcgcttcatgcccttgcccatcttgcgaagcatcatcgacgccgaggaggcggtcgatgacactgataggttatcgttggacccggtgaagaaatggccttgatgggaatagatgctttcacctagtccgctcagttcctgctgctcggcaatagcggcttgttccgggccaagttgttctctcagagcttcacggcgcgcctggtccgcggcaaatgcttcccgcttggaagcattactttgtgcagatgtcttgaggagctcggaggcactgccaaacgagaaagcccgtctcaggcgtgatttcccggggcgcttcgtgtccattttcaaatcgttgagacgcttcgcagcaggagaatccagtgtaggcggtggtggctttttcggagcttcggctggaggtttgggtttgggggcttcgggttctgtcgataccggttgcgataatggcgatggcttgctcgtacgtttttcttctgccttgccggtcttgctagtgacggagttggattccgatggcgtcccttctcgtgcctgtgaaattgacaccgttagcgctgcattattcccatgcgaccttgtgaataatcctaccgaggaggccgacgagtgtgtcgagttaacgctacccacgctatcccgctgagagtgagaggaagcaggccgttgattggcatcaaatgtgataaagtcgtaggatcccgattggggttgagaggaaggtgaggtcgggaaatctagcggcaggtttgggtacgccgcggcatccatattgcccagacttcgtcgtcgatatcgttcgggctgggccctatcgacataagatgaatcatccacacttgagacgcgactgtgggcgcttggtcgaactggtcgagggccaccaaaatcatcgacaatcacggtcggaatcggcgagggagcaggcgatgatggtgcggcttccgctcgttgaggggtacgacgataccggttcggggagggtttcggtgacgagatgttcatgatcgggggggagggaaggttggcggtagataggggacggagcggctggtcgctcctcggccgcgagggaagtgcgctatcgtccttggaaacataggaacgggaggaagagttggagggattggatacagaaccagctgcaggatgagaggatcgggggctggcaccggtgtatgtcggattcaccggcacttgaggggtggtgggtgcagaaaaggtgcgatgttctggccggagatgtggtgtccaagattgccgattctggacggattggcccatgtttgggttgtaggcatagggagccactaccgggtggcccgctcgataagtcccggaattaccagcattgaatgatgtccaagacatagtctggatacgagagccttgattctgggtggaagaagagaaggtgcctgatgaggatgaaggacgcgtctgaagcacaggtaccgtgccactctgttgcggaattgtttgaaccaacgcagccatattgttttccccagcaaattgtcccaaggaaatcacgagttgtccagggctgtgatctaaggcaactcgcaaatagaaaaaaaaaagagatagaatatgagcccgaggtgtgttcgtgtcaaataaggatccgaggaacgagatgggatgctgcgaccaaagagctgtcagctatctatcacccaaataagaaccctcacgttgttaatgcgatatgaagggtggagtttgtaaggaaaggggtcgtgctctgcgtattttttttttctcttttgctgtgcacgttgggggggaataaggaaccgcgtcagctaggggggcaaccatacctgttctaaagtaacgtggacatagactatagtggtacaacaattaaaaaaaaggacgcttgatgccagaagaatgaaactcgaaaccaggcgagttggaagaaacgaaaggaggtgggcaaaaaaaagagggagatccctaggatgatgagacgtctctagaataggagagccatgtacaagaagaaaaaagagagtaaacagaatcaaccccaggaccttcagatgacaatgacactcgaatgtgtctgtttcttagaagtgggaagagaagaagaaggggaggagatgagaggagggaaaataggagggggagagatcacggtagacacggggtagattaggtccgggagtacggactccaaggccaacttgaatggaattggaataggaattgaatggaattgggaaatagtatagggaaatggccaggtcagttaaatcggtcaaatagctagccaaaaaagagaaattcgtttctgaactaattatgcttatgcgtcgctttgcatgataggagtacgacatgtggtatttccatttggtatgtctacatctgtctatgttgtatgtctgtctagtattgtctaatacatacatactgactatatacatactacatactagctagactaactagactaactatcctcctacttcactcattaattcacctcctgaagccgtacataaaaaggggcccgacctccaaatttatgtgccaatcatagggctccccttgatgctccatcttgatattcttagacatcttcatagccacgcattctattctgagtcaagatctttcataaatatcttgtttttgtacacgggtccaagtccgaatgtatgtcacccggtacctgaccacagagactcctgtcaaactaacgcaaggcaaccttctgcagagaacgtgggcgaaggaattagcgacatggatccgatcggcctggcaccgcgtcccgcgatttgcgcctgcactaaactgtgacgctatctcggcttttccacgaatccacatgtgttcgaaacatcctaaagtacgtggatttgtacttttggggctttgggggcttttctctgtactttgtaatgcccaaacagtaagccctaatctgtcaattgagtaaaagactccccgcttaacccggacttggagtccaagctgtttccatgggttgtagtaatccacccaagctagttgacagttatcgagcaatcatattgttctatatcgtcttattctatttcataccattcctatctactaatatctgagacacttccaatgtcacactacgtaataaggctggatttcctagttctgccgtacagcatggcgtgatcatatctatagctccgagttgaaaatttagaggaacttaatctattttcgttctctacaacctatacacttgtgtagttataccgccggtcctaaataagctttatctctcaacctcaacggtatgtaaaacgaagccctaaaatgacatgagttcgtcggcgcaacaatccagcttattgacaccgcgccactccagggctgaacctcaactgatctctacttgtaatacctgacagcgttctcctttcagagtcacgacaatatcctcgtaaattcttatctccatcgtcagataccgtacaatccgacatctccgcgtcaaaactgtcccgctttcactccccacttgctgcaaaccactcaatccgtcgatccacatacaagacaacttcccgcgtgatcggcatacacttctttcccactcgagtcgtttagaccatttatcacctccgaacagcacactccatacacaggtggagaataccagggcaccgacctttcccgagcgtggaatttagcgtgcattttagattattgcgtactgagggggggggcccgcgtctgataccgcaaatcattgattaagcatcctgacgcccccgtttcatttaccagggccctgtgcgctgccaatatccctattcaaccgaatggggaaaccctcaacaacatgcacagtacgtggctgatcaggggtagccattcgggcacagaccaagggccagcctttgtgcagtccaaatcccgaatccacacacgctgtggtctgattgtttgacgggtggatatggacgcaaccggctctagaggccttcaacactgctcattcgtgcggagtatagttcatgtagggtgctacttaatgtacaacatacggagtacgaaggacgcatatctccaccgccaagataacgtcccaaaggtcccaggtcctgtgcttgcactagcattgagtcggaagtactaacttttagtatgttgtatccggggaagcacgaggagagcggattggccattgggaatacacatggcgttgtactgtggtattatgagcctcttagcctatttcgctcggatcatgtccgatattgttgtgtcatctgctccgtgcagtgccggtttagggtacacacatgccaggccttcacctttcctaacttggatgcaggggtataaaattctattttttgatctcctggatctcatcgatcttgtctcataaacatctagccaggattatataccttgaatcaataatcttggtcatcctccgaagcattcatatcatcttcatcgtccagaccctcaaagatcatgaacttctcatttttggcatcggtttcatcaggaacaacgtttccgtcttgaacctcgcagtccttcagcacggtttcccggccgatcttactgcgacgtccaacaatggtacccgttaattgacagcgttcgccaacaacagcaccgtccatgatcaaacaacgtgtcagccgagcaccgctggcaatatggcaattagcaccgatgatggtctccttgatcacacacttctcttcaaccgttgagttgttgtccacgagacagtcgttcctcgtgacggtacaccgctgcgcgatgctcgctgtgttcgccactttggaggcgtgcgcgaatgcagacgaagcaactcggccaacctcttcgatggactctagtttagcaagatggagagaggtagatagaaggatggctgacgaatccacccgtcgaacaaaaggtgctgtgcccctttggacgtaagcgagcatcggtggtagatttgacttggaattcttggcagtttgcgacgtaaacttggctggggtggatttggtagtgctcatgctctgtagatcaatctcttcctccagtgattcaccatcgagggattcaccgtcgtgactctcactctcccctagagtgagcccgtggctctggcgacgacttttctgctggaagatttcgttgatcttcagcttctcgctgaggccttgctgccattccgatttggcccaccatccaaccaagtcttcgccgaccgactggaattgctcattcaaacgagccatgtccttgacccagtaaggtaggacgtagatatgcgcatcacggtatgtcgtcagcaatttcacctgcgcatgcgtatccaccagggaatgacgcacaaggaagcccttgtcattttccaatttctctttcaatgtggccataggcatagaaaggactagcttggagagcgaggaacggggcgcggcatgagacacggtaggagcctcattctgctcaagtggcgcaactgccaggaagtctgtagcttcgcccttgacactctcctcccgaccctgtgtctgatagtacatgctgagtccattccgacgatccttctcgccgccacacaccatccatgcttcaagcagagactcgccgggtatttcgcaaactagatcacatggcaagagaaggaagtcggacttgatacacgcctgcacctcgggcagacggaggagctctgctgtgccagtggtcatctcgagttccgccggtgcgatgacagacggcgaagggagtgaggtaagatgtgggttctgtcgtagagcggcctggaggggagcgagcgaagagggaggagtgaccaaagtgacatctagcatggtcagtcttccatccgatgttttgcgacaaagcacatggcgtcacggaatgccccgcatgctatttcgacagtgggcatgggcttaccagtaatgcccattcttttcgaccagtctagggcgtaccagagcatcggacggttggccactgggataaggcattttgggtattcctcggggttcgaggtgaatgtattaagcgatacaccagggccgcacttgtttgcttgttagcttttgtttcaagatacatatatatgggaagctagttgctcacaagaattagagcctgcaggcccgttggtggtacagatactgagtgaggcatgttttcaactaacaatgcacttgcgagtccttacacctagtcatatatttctttgaacccgataagatggaggagtcagaaaaaccacttacataatcctaacctagctggagatggcacgtgattatgacccgtcctctccagacacaaacaggacaaacacgagtaaacacccgcggtaatcaccagccacatgtttctatgacccgaggggggacgcctgcctcctttccctcgtttcgcttctcccaacctcttattttgccaatcgacgtgtcaaatgcgacctgcgagtcattgcgaccgcgactaataaccgttaaatgtgccacctctgattgaacacccgcgatcgcaatgtccttccctcaagaccctcggcgccgccgcggcggagccggaactgggttcagctcaaccggcggacggactgccattggatactggctccctttggccttgactgctggaattgcaactatcagcattgcagcttggatttggagtgaacgaaatgacgacgaagatgaagacgaagatgaagacgaagatgaccgcccccacggagatgaccgccctcacccgcctcctgttggacctggcagtgactacccaccttcctatgctaccggggattatgcccgaagcacaggagcggaagttcttcctggagatgcttcctatgatcatagtatgatgggtcgcatgcaaggtgctttgcgccgcacgcctagccctcaacagatcttcgatggcgcgagcaaaagagttgtggccggtgtcactgctgcaggagcctttgtcggtggcgctcttacctcaatccgtgaaaatgataagggtgagggcgactacgaggaccactctagatggtcggaggaggctcaaaccagggctcacgagagaagccaacaaggcgctattgcgcctactatgagtggtggattgccgagccgtccagcaaatacgcttaataaggacagaaagatcgtcgcaattgttgtttcctcggtttcaccggctgactccgacgaatttccttccgaacatgctgtaagaagtcctcacccttgatacccactttaggcctttctgacaatcgcagtccattctatcccatctccctgaacatgtcgatttggaaacctctaagatctttgtgttgatttatgccccggaattgaaacacgccatcaaaaaggggggctcatctcccacaacaccctctgtggcttcgtcttattcaaacattggcactgaagaaggagtttctgtcggggaactgggctctggggacttgagtgcggtagagccccgccaggacgacgaattggagggcacatctcgcttgttcaaaacgttatacacacaggcacaagcgattgttgagaaggacagcatgatcatgcctttcagtacccctgggggctatgtgcacctcgcccgtcacttattccccgagcttgtttatgtccaagagtctttgactggagatcatggtgaacccgccatccatatcgctaattgggttcgccaggttatcgtcgtagtcggagatgagggtggccgtggtgggctcatcgacagtgacgacgagtcagcactcggcgagaaggaagagaaatggtggaaaaaggagggcgtcacaggactcggcaagcgcattgatgtggttgacgttgtccgggtcggagatgactggagacgacgagtgaatggtctggactaggtcagatcaagttgtggcccatgatttttatgttgatacttgtctgcttgcatgtctatacatgttttcgttttctgttaaaccccctcatgactgattgaccctattcccctgtttttttttcgaattttttgccttcatttgatacaattcaactttgatattcacctttgaccagaataattaatgtgtatggttcttttgccgcaagttgctcctatttccaacatggataactctcatagttagttcacttagctatgacatctgtagaattctagttgtaaggcattagattttggtagcggtatataaaatctattcaagcattgattcatcttcatacatccatccgaggatatatttcgaagtcactttaagctatttcgctctggtctctagccaagaagacacagaagatatccaaaaaggtttacatatatcaaaagactaccaaaaagacacgccaaggtcacatagccgctgacttctcttgtatgtattcaatcagtctcattgtggtatctcattgttgcatccattcaaactagtccgaattaggaatttatcatgtgactgacttcgcgcccacggcttggcatcatcagttgacctacctctacaagacctcgtccaacggcttttccgattcacgccttcctagcagcattattggacgagtgctttctttctttcattccttaatcccactcggtcaatctccgccgatcttccgcattgattccagctgtgctggggaccggtgtcgccctacttatccccacatgtctcgcgcatcggccatctcactcatttcccgagcacggctttcattcaacatcatcaaaccatcattccgataagttgcattcttactcactggccacgccgaggttgcgcaaccggcgcagacatgatggcgaccgcaatttccaagccggcctcccatacacagaagatgaagcggccgcccccgcctttcggccaggccgcggtcaacggagtcaagggccagcacctctcatcttcgccctcatccgccgcaaaacgtcttcccacgggagtctccgtcaacgcaacttccaatttcacgaatggcgcagcccatgtggcgagttccaacaaaggcccccttaatcggaccaggaatcagtcgcaaagacccatggatcagtcctcgcgctctggccggccagtaacgaggaccgctgcagcagatcaggcacatcgagttgggaaaaaagcaccagaaccatatggtagggagttctgtgacattcgcaatgccaatgcgcgcactaactttcttttcatagtgaaaacaacatcctatatccttaagaaatattcgaaatgccccccatccctcattgtgcatctacatcctacacattttcgatttgaacagcaagatggtagcttcccttacaactccgagatgaaggtcatcatcgagcacattcgtgctgggacagttccgcatgatctgattgaggagcttctacgaggcggtgtgcagttctatgaaggtagttatcgtctttgacaggtagtcgaattacctcctgctaatatcattaggttgcctcatcgtccgtgtcgtcgatcacaaatctgcctcggcgcaagcaagaaaggcatccactacctcatccaacgagaacaacacaccattctctctacacaactacaacgaacatattaccccatcagcttatgttccatacccaaaacaaaatcagcttacgtcggccacacaaggcaccaaggccgatgggacatcgattgccaatcaacaaacagatggcccggcgactagtgagcagacggacgacaaaagcatcaacttaggtcagaaaaatgctcccatgaagcctcgagtattcaccacagtactccatcccactgctcgaactttgcaggcagagttgacgctactggtcaccactccggacccgagagccagggcaccaattcaagcaagctctagttcttcagctaccccaggaagcaatcaaccagatcgtggacacgtcgcaaagagacagaaaatgctggttgaacctgaggatcttgtggaatgcgaatctaaaatgatacaggcattggcacctcctctcttcttggatcccgtgcatagtatcgaggctgcccaagagctgttcaagcacctggaaagcccactgcatcgcgacccgccgcccttgcccaagcgccgaaagagaaccgttgccgaacttgccgcggatgaagccttggcagcggaggaggaaagattcatgctcatcatggacgagcgtctggagcccacggcttctggtcctggcggtgctgcgaaggctgctgccgtggatgacgcgggtggtgtggcaccatttgaaccccgattctctcgcttcaagacacttgaaacgattcgcatgcaacacgaggagaaggctaaacgtgaacatgaactgaagctgaagcaggagttggccaagaggcaacagcaggagcaggagagagagcggcgccgtgcgatcgagcagcggcaagccgaggaacacgcgaaagaggaatcgcggagacagcaacttgctgcccagcaggcccaggcccaactcgctgcgcaacagcaaaatcgccacattatggctcagcccaatggcatcagccaaggccaacagtcttcacccgttgtgcgtaaccagaccgcgcttgcaacttcatcaccactggttggtaatatgatgccacaggcggttccgatgaccatgaccgcatctgggtctggcggtagcccaccgcgacctccatctgctttacagcatgcgcatccgaatgtcatgagccacccgatggcaccttcgagaagccagcaaggaccaagccgacatggtactccacagatgacccaggggacaccggctatgtcgcacgccacgccaataatgcgtaacgttacgcctactcagcggatgagtcatggcagtccaactcactcgatgggccataccccggtcatgaatcagggcatgatagccacgccgcaaatgaacgggggaatgtctttcacgccacaacagcagatgatgctgcaacgacagcaagcgcttcttcaggcgcaacaacaaggacatattcagcacaatcagttcacgccacagcagctagcccaactacaagccaatgcacacgctcaacaaaatattcagtctcatcaacatcaaatgctacagcaacagcagcagcaacaacaacaacaaagcagcagcagcagcagcagcagcagcagcaacaacaacatcaacagcaacaagcacaccagggtattcctaaagtttctcagcaaggccagcaagcataccaggctcagctcatgcgtgctcaatatgcgcagatgcaaatagtcaagcagcagcagcaaggccagcacccacaaatgcagggccaacaaacccagcctcaccaaggcaatcagcaattaaaccaacaacagcagcaaatgctgatggcagctgcacaggccaatggtggcatgggtcaaaatggacagcccatgaaccaagcacagagatatacccagctctatcaacaacggctacttcgcatgcgacatgatatgtcgacacgctacatggctcagtatggcccgccaaaccagtatccttccaatattgcgcagcagtatggccctggactggaaaagaacgcgaaagcgtgggtctccgaggtcatgcgacgcgagcgggatggcggacagcaacaacagcaacagcgggctgccttgcaagcccagcaaatgcaagcgcagggctcaatgcacagcatgggtggcatgaataactgaggctagtctgtctgctggcattgatcaaatgtggcgacatacgagattgttgataaccggcgaggacagaaacttctccacatttacaattgaccagtgtaaaacctggctcgaggtcgatttataatgagcatctacctaatggcagtgggtcattggttagcaaccgctcactgtctctgcttttggctttttttttttcgcgttttctttttgttttctgtttcttttctttttcagaaatcccggggttttgtacagggaccaggcatcgtggagattggggaggatggcgttacttttattgctttttttttctcgttcgattgtactattgcggcgcggctttcggtgggaaccctgggatttctcaaactcgataccattctgtacaggcgttatttgatatcacgacgcgactatggggtttgggttggaaattgcattgtggaaatacctcgaatttgataacacaaaatgcaagaactggattctgtttattctcctagacattcgtatagcagacattttgacggtgcagcatcggtctaagcacatctcaaaccaaagctcaaatgtcataccatcacgaggcattcaatatcgctttgaatttttactcaaactaagcccatattcttgaacaggaaaaggataagacgaagcacaatcaaagtgatattcatttcatataaacaaagtctacgaatacgggatgttccagatcttcaatggatgtttgccatctcgggcgaaccgtaggacaaaaatctagtactcactggctagggaaatagttaaatctccatttcgatataagcacttcttcggcgcgaccgcggccatgaaagggccggatcgcaatttgacatccgtgctataagctgaaaagctgtgtgtgaaagggaaaggcacataataatgatggtaagtattcaattagacacataaggtatcagagctatgaaaaaagggagatggggaatatcaaaagatatcgtcagtatgtaccacccagtaaaagaccgttggtcggtggccatcacttcctgagactgttctctggtcaatcgttactcagactgttgagcttgatatttttgaaacattcatggagaagttcatgtcaatagaaattggtgatcatcatagtaaggagagaccagagtgtctcgcgagatgtggagggtatatagaggcaaggctaaagccaatgaccaagggaagacattaatcccttgagcaatggctttgcaaagcgcattgttgtatggtcgagtggtagacaaaagatgtcggatttaatgtgaaggatctacggaaaatctgagcgctgagtttttatatcgtgtgattacataaatgatgtgtcagcacggccgagtccgtggatgactaaactggttcccgatcggggaaggtatcaacagccgagtagttatacatttcaaagatggactcatatgggactttggtgtcttatgacttggagagtactatcacccgatgaagaagacgagtggacataatagcatggtgcctgggctaagactggattggaagtgcattcaagaattaacaatacaatcaattccatcgaatgggaaggcgggaaataagacacccacgaaaatatatggattcttgtgaggatggccacttcgagacctcaagcgagggatgatcgccgcacatcacccgaggaccaagtaagccgagcgaataagaatagccggaccccttcactaacactgataaacacagactggagtgtataatgatgttgatgttgcattgcatagaaatgaatcagaaataactcatactaaaacaacccaatctcagagcctagaagcgactttattgacactctaatatcacataccaatgcatgtacaaagtacatcgtacgatccgtgcagttacatagtcagtgtagatctgtatagcgtgtatgcacggccaatcgaaaagggttctcacatataaacgccaagccagattgccattgcatggacataggtacggtttggttcggatgctagagggcccgtagttatgctattctaaaccctgtataatgtctcactatacgacattctaccctaataatcgagtccatgcgcatagacatgccgatgcggtccacgagtgtgttaataggcattgtctatgtggggagagtttccccctggaatgtgataaaagtgtacacattaacgaaacgttcgttttatctgatattttctaaggaaatctaacagaagaggaaaaagccaaaagcattcgtaatcgctgcagtgagatctctaaatagcaatggaacacgaagcgaaaacagtttaccgatcattcgcgcacgcaatctagaaaagaacaaatatttacggggaaacaatacttcgttatacaggatcaatagcctattagcgggtagacggatgcatttccagacggtatttcttataggacgaaacccaggaatggaaattaatagagtgcgaaggcgatagaaggtgattggatatcattcccgcataccatgccattggacggactccccattcccgatttgtacggcgtggcatatacatagcgcagtgtaactgttcatgcaggacatgggcgtcgggctaatttaacgtcgtgcctaataatcaccacaccgcacaatgtgccaaccatcggtgtagcgggtggactgagttatttggaatgggatttggaattcaagagtaggtggggagttgaggaatacggtttggaattagtggaatatctctgatatcggaaaataaatgaggctagtactctgtatattgtatgttgtacctttgaagatgatagatgggggtatatgccggtaatggatgtgcagggcaaaaaggccgacgaacaccctcctttggacttcgaagaacggtcagagattccatgcacgttgatcattagtggaaaaaaaaaatacgggtttgatccggaggtcaatgggtcctttctcatagggcattgatctcttcttttgctttgctcggaaagcgctcatgcccgtggacctgggaatgaggaatggggtgacgcatgaacacccacggtggcgaaaatccaggcacgtaggagcgcggctctacggtgtgggatccttggccatgaagcatgtccaatgtagcacgaaattatctttttgctttttctcattcccgtctcgtttctatacttgctttttcgcggtgctatacttagaactatggagtacgttggagggtttttgcaaggttcaagtcttcacagagaacgggtgaatggggctccacatggctgtctgatacatgctactagcgatattggtcgcgctgtcgaaagtggcgcaggtcatatagtggagtatcggctgctcgtccattgtggtttgcagtacggagtagtgtttcagtgcatattcggggcactgtgttccacattaaaagtataggagtattctaattgtagacgaacaatgtccatagccgcggtgtagagatgatgacatggcgtttctgaaacggggtgatgagaacactcccatttaggagtggaatgtgtggagagctccgaggacagacgagtgaaaagtacagtttgaccatgatcatgtctgcagcaggctcgatttgtgccacattgatccacttcatcgaccagatagatcggtttggagagatccaggaactaaagatctagagccccgagggttgtgatgtgtaacatttttggggcatgtcatagctcccccaccgtgcgagtggcgaagtgagcaggttccaagctgtagcagtctagcccatagcccagaatcctagtaagttgttaaaagggaagtggtatacaagaagtggaggcaacgagaatgcagtgcaacaatgtagatctgggttttttgtgtatattatgccagtgtgcgattatgggggtggtagtacaagcaataaatggagaaaaagaatagaacaacaacacgttgtagcagattgtacacgatcgcccgacccctgagggtgttcctcccaaatgattatcccagttggcgatctcccccaaaccagaacgggaaaaaaaagagaaagacatatgcaacgccgcatcaattccatgttcagaaaataaccccagcctttggcaccaggcaaattatgcaagagaaagagaaaaataaaagggaataaatcaaaaaagtcgcctctcctccaggagacatgtacaacgccgggcgagaggtcaatctggcctaaaatgccagtccgccagagacggggtatcaatagaggccaagggccaagtttgggttttgtgtttttataattccatattttcctctggaagactcatgtggaattggattttgtgttttttttgggagtttttcgattttcgattttgttttggtgcggtcattcggctaatcatcccagccatcgacgctcagctcgccacagtcaggcatagtatcttcaagcttgctgccgtagatgggccgaccgtcgggagtaagttgtccacggaaatcagggtcgaaatcctgactggtctcatcgagagtcgcaacgtagcggttgcgaccgccccgcttgctgtgggtcttggtgtagtgagcgttgaggttgtcgctgcgggagaatgcacggtgacatccaggaacccagcagacatgaggcttttccttggagtggctcttcatgtgacgcttaaggtgctcctgacgcttgaaacgccccttgcagccaggctccttgcacttgaactgcacttgcttgatgattgacggcaagttctcgagactcaggttagagcggaggagctgtttcttagaggacttgcgcgagggctggcggtgtcgttgcatcatgccttcacgataaactggggagagttgaaagtcttcctgataatcattgtgtccggacattcggctgaccggagtgtctgatcccgagggagtccccatagagacggatcggtggggggtagaaggagtgtgggacttgaaagttgggatattggtggggaagtcggagtaggaagaagatggaggggtcacgggtcctgaaggaaagggttggacctgagccggggtgatggtttgaggtaccaaggactcgtgggagggcatccagtggagcatattagacattgaggcggaattaggcatccgctcagtgggttgggtaaagattggacgagacaagcaagggttggaggccgattcaggcagatatccagcctgttgagggcggtggtagtagttgcgagccatctggttgtactgaggcatcgaggcctggtagggaaactggtgctcatggtatgtctttggcatatcctgagggatccaaagttggtcgacgttctcatcatacccaggaagatagtctgggaggggcatctgctcctgtcggtccatcgtgccgcagggcatacccatcatggtttcgctcgaggtgagatccgccatgcggaatgcgctacgtagcggggtagctgaagttcgacgctccattgggacgccgtggtgatagtgaggatggtcgtgccatccgggtgaggccattgagccttggctgtaaagactggtaggcgtgggagtcggagagtccaaaggagaaaagcccgaagtcatcgaggggcattcacttgagctcaaagagtggcagtcaacttcaacggtcaaacgatcagagatgtgctgtccgtgagatctcatatcgtccaagtcctcagtcttgaaaggccgagatgcaaccgagttgatagtgtcacctgtccgggggactttagcaattgttttgtgtttttttttggtgtttgtgtttgtgtgtaataaggaaaggcaaggtcaagcaattgacaagtagagagaacagagcgagggtcgagaggtaaagaaagatcaaatgaaagtaactataaaagaaaggcagggatggaaagagatagaggcaaagcgaagacaagagaatgtgtattaggtcccggagtatagggaaaggaaagaatgttcaaaagcaaagggaatggaggacaaacgagcagaaataaacaaattggtcctgcgtagaatcccgaggggtggagatccgacttacagctatacgccatggtctaagctctgattcggacttgggaccaaaattagagacgcgtcgcgtgctagaggttccaagcaaggctaggaatgtagactataagatcctccgttaccgcggcaaaggctctaacggctggatctgggctgggatcgactgaagtgcctcgaggcctgcaggtttgatcgatgtttcgcgctgtttcgcgtccaaacgggacaataaggtgggctggtatggaacaccaagacgataggcgatgtattggtgtcagaagccctttgacgcggtttaagatggacggttgaaggggaggctgggtctcagattggatcaatagaggtaggggggtggtgtataagtgtatctggcttgaggggaggggagattataagtacagcaaggagtagtgaagggaacgatgtcttaaagagcccggaaatcagtaaggcaatgagaaagcaatgatccacggggaagcttgttcctggtacctttttgggccgacggtgctgcttgagagatttggatcggcgtccctcgccttttgttttttttttttttttttaaatcggtttaatatttagtattattgtgtatattgtttattcctttggctattaatacaagattaactaaaaggatcaatagccagaataatcgggaatcccttttcggcctacccactttatagtacctcacctataatccctattaattctggttcatgcatcattattcctctccaccaatcctggatcatgctcgctgtactccattggaatgtctaggctgtacctcttaggttccgtgaaatgtgagcagagtctatttgtacatgcaggtcgatctcgtccccggactttctagccgtgtcgatcatgatgcacaacccatctacgactctatgatctcctattactctccactctaggtctcagaagcaacccttgacggcgaaaagagtatttatgctcctgtatttactgtcaaaacaaaaatacccaatatttaacaacccgaggacacccagagacacacggaaataactataacccaaaaatatgagctcgctcggacgatagtggaggctggatcgatctcattcgtacttttgcgacaggtcagacgtttgaactcattcgggtctgtgcaaacctggttgacgctgcatctctcccggagagtagcaatctcggattccagagcttccaccgacaacattcccctattcctccgccttatttcctctcgccaagagtgtcatcgtcactggtggatcggccattgtatttttataaaattcaatttgtttgatactcttttatcttatcttttcctacctgagtctagtccccgcccctccacccccccgacccatccgccccacgatgtaagccgtacatannnnnnnnnnnnnnnnnnnnnnnnnnnnnnnnnnnnnnnnnnnnnnnnnnnnnnnnnnnnnnnnnnnnnnnnnnnnnnnnnnnnnnnnnnnnnnnnnnnnnnnnnnnnnnnnnnnnnnnnnnnnnnnnnnnnnnnnnnnnnnnnctccacccccccgacccatccgccctacgatgtaagccgtacatacctccagggggtccccgtacggacaacaaatcaattcagtcattcggtctccattggaatgtgagaagataaaaaagcaaaagcaccgcaagcctcggggaacaactgtcatccatcccgctgggtctgcgaagagaaaaaaaagccaatccgccctaacggttcggacggtgtcgggctaagctggcacttgcgtctgacccatcacgcgtcagttgagacccgaatgatgggattgtcctcgatgttgcattcattttgctctcgacctgcgtggctaatagtcggaggccaaactttcgcattcttctttggatgctcgttccacgaccgtggccactcatttgaaacatgtccccgtccagatagtgatcggcctcgaatgtttgtcaccgctgcaggtgtgcgaaatgggggaccggttctccatagtaatgggaattctgttatctcactgtttgccttggtatcacatcgcgtggatggagatgaaacagggcttatccgtttgaccataaggctaacgaatttcgccttgagaaaaaaaagccgtactaacctcattttagcagtcagattaggtttcaactggactacaattgctggtccgtacttcttttcctcggcccctcttttttttgtcgatcgtttatcgctctcgcgtcgatctgtgtccgccagtgcgatattgctctgtatcgactgtcagatctagcccccgacaagcccccacttcacttccttctatttcttgcatctcaactacttccttaaaatccttcgccacgctttattgatatacctgcataactatcccccatgagcttgaaaaccggtttgacacgcttcttcggggtctattgacaagatgcatttattcctgcagttagtcaagactattgtactttgtgtgagtcccgaaaacctggaacctggaagtgaacgagccccgccaagacctaagctaacggaggttgtcccatggactttctgacttctaagtttttggttaaggttccctgactcgggttctatacatcgacggagtacataaatgtaaccttttaaagttatacatagactttcagtcttgatatctacaaatggagagaatctatctgagcattttgtagcctgagcattttcgctgatcaatttcctaatgcttagacctcagtgcagcaagggtgaccgaatcccgaaccccaaaacagaaaggtgttcccccagatctgtcggcccctgcgtctgaagggacggacttcaccttcgtatagggtttcccttcaccacaaacccaccaaatccgtcttcatgcttcacttttcgacactagagaccacaatcaccaactagatatcgtattgcagtcgggcccgttcctggaacctctagaccactgctaaagtacctactcaacccgcctaatccaccgcaatgtcgtgatcatcgacgctggaaggtttcgatagtgactttgctttcgtcgcatcgagtcatacctcaatctgcacagccacctcagcctacctggtcgcgccacccgtagagtgtgatcgctggtggcttgtgaatggagtgtggcttatctggggtgatcgtcgagatatcgtacatcttaagatctacagtgagtctctcgccaccgctgttgactgcgagatttttgcctgtggttttttggggctctgggatgacttgttgaggctctctatgtatgatcccctgttgatcgcattgcttggtttcggatatgtgcagcggtggcgagtgaaacatcgaggcagactatctctgtccaaagtacatgtagttgccctttttcggtaatcacatactacacgattacgtaccattgctgcgtgagatcccaggctagatacaactatgttgtacctcaactaatattgtactatctattattgtgtccactcgatgattgacattcttcggtatgcacaacactgtgtctgagggcaagtgctgacgggtgccactgacgcaactgcgaatgtccctgaattgtacttcggatttgtgatctcataccaatacttcaataggttcgatatgcaatctgcaataaaggttatcagcctcaaagcgcctgactactacgatcggggaccgtgcaactgaattcaaatgtcccaaatcgggttttgttgcctctatcgctttttgcctcttatcgaataatttggccgagtgaaacaagcattgtagaattcacaaagtaccgacaatgatttgtctcatagaataatttggcatttgggtcggatgatgcagggacgaagttgagcggcctataggaagtaagcatcagcgataggctgcaaaagcgatcaatagtacacaacataagaagacaggcacagatgcgatcatgcacaacccccgaaatggcacctagtgctctctcggtagtctctcggtgttgccctggcctagcaatttcccccccgtcaccccgcccccttacttttttatttccttttttctcttcacataacggtttcccgttcgctcacaatggcattaaaagaagatttgatttgctttttcaattcgcttttcctccaatgaatactccacgttgacttgcattgcattgccttgcatggaattgttcccggtttccaggaaccagcttaattgtggcaaaagtctatgcgcttaccctaggactctaggtctgccctattgaggtattcttgcctatggtggatcctcctctaaccatcttagtcgcactttagggattccccaggttgaatcctcgtgtgcccgtggacatcgtacctgtctgccctgtctactccttagaacgcgatgtgagtcgcgatgaaggagcacacataccactacgatacttaataccatgattcgcgactccatgtgaaaaaaatacattaagtttctattgcttgaatggttgaatcaaaaaacaataagaaaaccttacagtgtcgtagagatgcagcgttgcaataattccgcccgtatcacataccagcgcaagcacactgacctgctctattattcactctactggcccatgcatgcccgctgccacaatcttatgtaactcagtccatactccagggctaggaccaaagtagctatgtacccacggtaggataagcatgcgcccgaaaaaagaaaagctaggctcgagtccccaataagagccggatcgaccctgcacatcggactctctggagaatgtcagacatgggtgctttgcaggacccctgcagcgcacgaaccatgtctagcctgtgcggtcggcgacagcgcgctctgattggtgtgattgcggatgatcgctggtgggaattcggtgatatcatattattggggcccttgcgccttgtcggtgcttggctggcctacttgggagacgtacatgctgttataagatgtggtttcatttttgctacatattggctctagggccgcgactccagtgcacgactatggagttgtctcgagtactattcttactgtatcttggtttcggggtgtcgtgttaaatttggcttgctaggaccgcgacgtgtgcttgggatgaactcctgtgacgcggattaaccagacagggtctctgtatatcattcttgacttgttgggtttatacgcgctctgtgccgccttggattgggcacggccggtctgtgctctgactaaagagtgatcgtcgtaagctcttcgtataggttttctgagcggaaatgtgaagttagatgactagtgctgaactttatagtcttatgggaccatcacagcaaaagtatagcaaactgatcttcacatgggctattccgttctggggtttgacgtttctgatatcatttctggcgtacttgtagatatcctcttccaatccttgtccatctactcaagcgtaagaatagcggacaacagctaaaatcgtaaataacagaatacccaaagcagcctacatgatgattcgagaagactgccgcaaatgaacttgatgtgggatctactagtagttctgggatgagtgtagtgaaagaaactttatgatcttatggtggtatggtgtgatatttatcgagtggggttctactagcgatgctagcttgactgaggatgattgcacttgaatagcaagatgtattctatatcggtagggatatgctaatgtgcgatggctaatctacatcatactctctcaaattgtatgttctacgttcttgaatgtgaatatatatatcatgattagaaggcacagaagacatagatttgagtatagcgccttctggattatttcaagtacagaagtatgtttttctcaccatcatcaaatcgtatctttatttcatatattaagctacgtgagcggtgcatttacttttaattcgcctaatcttctcttccagttgggaccaagtcgtatagcagtaatcagcagtgtggtggatatttgactcttgtctggtttcgaattcgagagatcgcgtccgcgctcacagctacatttcgaagtgttggactcaacacggtatcatattctggcagctacgtaattttgataaaagacagtagaatttattatcaaactaacatatgaacggagtgaaggtcagtgagcgatgagaccgggctggacatgtgacactgatcacatgactatatcaactggcccctccctgtcccacttttctcttctcttccctccaaccacaatcaccactcgtatacaatatacatcctggctagtccatcacgatatttttaattaatttggggatgaggaacgctggactctcgttcgaatagaggacagaggatttaccctcactggtaaagcttttccgtcatgctttcatacccctggttcagcgacatctcaaactcagacctaggacttggaccagatgcagtctcgaactggaagcgcaaacaactacacaccgaattgaattgtctcctagagcatggaccgaaatgggcataaatgcatcctctccatataaggtcaccgggttacgactggcccgtataattcaaaaagcgaggaagaaggaatgagcgcgtgacaggaagcggttcgtaacatttttggcaagaaagggacagagaccaatgggaacaggcaattgtggctggcgaagttgccaggccagcggcatggacaccgagcgagtgaaaaagcctatgaccaatccggatcaggaggagacaggggaaaaagctatgtctactgggtagatgctttatggcctcatcatcttgtcgcgactaaaccaacgaatgcccccatggaccttgccctttattgcctactctgagggattccgagaaaaatcctccgataatgacctgatgcctgaatcagccagagaatacgaaacaagctggatgattgggctactccgagaagcagatgctcgacgttggaccgaggaacggcatatacctccaccacgagaaatccatcatacgctccgggcagattttcactatcacaaccgacaagtctgcgttcatatctgaacctaagactggtaattttatcaggtgccactgtgggcatccagccgtgatatttgtgatcatccctggttatctgtttagtagtcatgagaaatcaagtctaatgaacacgtcaacgggtcaaagagtaatttatatggcttgtatattgaatagagtaattatcaagcctagaaaaaaaacaagtaagctatgtcgagtgacagattttcttgcatgtttcttgaaacatcctcgtattccatattggccgtgtgacttttatgtgctgatcggccgatgagagctctcggttggactctagacgaagacagatatgatttgccttagaaaagacaaagaatcagggtgacctccagagaaaagacgcaatgatctgcacaagatgtgacagtgccgaccctggatttttgggaaagggacgcgtgaaggcgaagaacgtagtaacaacgtatagaacttgggcaggtcttgttctacagtcgacatattttcggccttcaggttaaaagaagaggactcccataatcgtacatatgacttgatcccttttgattctttgctaggtgactcttatgcaagacagatctattaccatattgcgacttacagcgagaatcagttcaaaagccaaagcctcggctagctagaccacgcgaggacatggaatgaccaaataccgatctgtctatatgctgcaagcaagtagctgcccgcttagtccaagcccgaaccatttgaataggtgcattgcccaaattcgagccgtgataccaaaagattactaggacgaacaggtattacaaatatctgaacaggtagcgaagcagaacccaagaaccaatgatctcgacaagttcccaggacagacaagaatctcatctccgacaaatgcaagcccaaaaccgaacgtgtcgcatcttgcgacgtgggtgccacccgactcccgcttgtgtcgtgcaacggaaagctgcagacgaaaaagaaagaagggaaaaaacaaagagagaaaaacttcgctcaattccccgagaaaatcccccggttccggggcattcaacatctccacaaatcatgcggtgttggtctgattcgaaatctcaaggcgcagcttcgggcgcatgcagaagacaaaggcgagaccagtggacgggaacttgcagttttgcgtggtcaagtcaagaaaatgcggtcagcattttcgtcctgagatatcactgcatataatcgaagcctcgtgtacggtcagatatcttcctttataatggacccggggtgttgatttgccgcagacattgaagatcgatatgttccaaggttgaaggaccgaccggctcatgctttggggctagaccgatgtgaaaaaccaacatgaaggtggggttgggtgttgggaagatgcctgtcggactgcgtcgacatcgagagcgaaagaccgatcgcactacccaagaccacgttgctcttcccggaagcagggccctgaacccgtagagcgaatattatcgcttatattcaggggctgtgacacgttgtgtcctttgatgctaactcatcatcggccttcggatttaaacgtgcgatgtgacaacgtacttttgagacatgtcagatcgagccccgaactccgagctccgagtttcaagataacaagtccctggaagaatgggatatgacttgaatggagaacaataccaagctgatgtcgagataaatgtgaaaggaaacaaatatcgaagacaaaggaaaaaagagggggttagagtaccctggtctcaactgccgtctgtcattggactcggacaacgcacaaacaaaggcagcaaattagagcggatggcgtcacaaagataaaaacaaccttccttctcgacattccaagatatctagggcgccctttcttgaccttttttccaagacaatcccacaatcgatacaatgacaggcgagacagagccactattgggcgcacacgcgatcaaaccagcccagcatccaaagaaactactggtgtccatcgtgtgcgctgtattcttgatatgcgccgatttcggattcttcatgtccaccgcgccgcagattgcagtgtatgaagatatcatctgtcgaaactaccaggacactcttcatagggcgggaaatgagactctgagttcgccagtgtccaatccgtgtaaatcagaggcggtacagggagaattggcgctcgtgatcgggtaccaaagtacatttgatgtgatgcctggtaggtatcttccacgatatactggacttggggatcctgatgcctgaaatacaggtcttatactctcgctgccatatggcgtgctgtcggatcgttgggggcggaagcctctcttgtatcttggcatactaggcattcttctcggagagatctgggttaggatagtttgtaagttgtttgaacttgttactcgataatttcctgatcacttcatcttaggtctgtggtcaagtgtcattcccctccggatggtctggttatcagccgtgtttaaaatcatcggcggcggcgaccaagtcctcacggctattgccatggtcatagtggctgatgtcttctccgacgatgagaggtactgttatggcccgattcattgtgataaagctaacaaatatacagagctactgcgctcttccgtttacaatcttgtatccaaatcgcagagattctggccactccccttagtgcttatctgatgaccttcggtccaatgttcccctttatcctatccctatgcatcatcaccgtgggaagtatcccacccttcttcctgcccgagactctcagaaacgcaaaaggaaagcaaatcagcagagaaggtctagaacaggacagcgaaagcgagcagccccagcccccgaggaagacggcgttgcaggagctcacccgacaagtgcgcgagttcgcacagtcgacacgcttcatttgggccgattccaatgtctgtctaatgatctttgtgatgttcgtcacagtgatgagtcgacagtgcaccaatctgcttctgcaatatgtgtcaaagaagtttgactggagtattagtcgtgtacgtgcctgtccctccggtcgaaccaaaaactaaccatgctataggccagtctcttgatctcattgcgcgggatattttccctcgtgacctatttggtcataatgccaatcctcgccattttagccgccaaacacctgaatctccgtggaaatcgtagcgaccatttcctgagcaaaggcagcggcgtgctttcaatcattggatttgctattatctccatagctcctacacccgctatcttggtaggtggtcaggtcgtcttgtcaatcggatcatcatttatggtcaccacacgcagtctggctacttcactcgtacaaccagaccatgtcggcaccttgtattcggcaattgccattgcacagggcgcaggaaccctcctttccggtccactatttgccaacctcttccggttaggcatgcatcttggacctgattggatgggactgccgttcttccaagcctctctctttttcgttgtggctgtcaccgccgtttggcacattcgacttggaccatctccgcgaaccaatgacgaggaacaggaacctttgttgtcgtacttctaatatttcttcagtcaatttcattatatccaagcaattcaacacggatcccttcatgtggagagttatcgctgaaccaggcgaattgggtgattgagcctccatcaatgagcatcggaatcacacagatgatcgacaaggccgacagttgtaaacctaagtacaccatccaagctatcgaagcagccctcggcgacgtcgatgacccgttaatcgcgatatcccgcactacatctaaagaatacagcagaatttcatttattaatagaccactttgaacgaaactgtagaagaataaatacgcatagtctgctcagtttccatcatccgatctatttcatacttttgaataaacatgatcattcgaccctagggtaacaataatcttcatggggtactccgtagtgacaacagagtttggttggcaaaatataccatcaaggtataatctcaagaggtaggaggacacgcagcatgccagtcgggacatggaaactggcgcatacagcttgacgacgtcatttgcggtcgattcggggcctaagtcctactcggtatgtccgcggcactggtttgctgccgtaggtcccgacccatcatgggtctggtttgctttcgcgggtgttccagcaagacccgtatcctgacatttcgttctcttgtcatgatgtcctgactcatcattggtctggtcttcgcttctgacttgttctggcctgcggtcgatatacatcacgtagagagacttgggcggaggaaagccgaacatcgttgaagtacagctgtcctaaccggacgaaaaaagggcatgaggccaatcaaaacatatatgctcttcgtataccatggacctaataacgcgctgcctggtatcgatatgatatgtaatatgtaatagaaattttcatatgttaagcccgttctagacaatttagtgcattctcttgacgttgtatgcgaccagagattatgagcctgatggccttgagtagaatcaatgacggtttatacggcgggtcattgataagcagacatttccgaggcggcttttgttttagtacatcgatagatggccatagagacagccttctgttaaatcctcttctactggataagctattgctagaatcgtaatcaaggatagccaagagagagacgccatattagggttacgacagaatatccattatgcttagagtgattaatttctgaaactgcatgaatttatgacaattctgaacagaaaaaatttgaaagtctaaggttctaaggttctggaattatgggtgtgtattacaaaaatatccccttccttttattggaaatgttgtttcaaaatagcaagcgctttgatttgatactgtcagcaactgttgaacacttgctcttaaaatgctaagagcgctcagaaattttactatatatcgacatggcagacctagattatctttatcaataatatgtcgaggtaagaagggaaaggggtttggtacaaaggcagctgctttcagtttctgattgttcaaataggtgcatccattacacaggaggagcttttcgcttatactaatggccattttcttactaacgaataataccagctaaacagaagatatgtccggtttgatgtggataagctttgtaatactactgtaacagtcggcggaaagtctagttaggtcacagctattgacaaaatggaaggaggtttcagcaaggctttcttgatgagaaaggaaaatggatccgaagtgatagcaaaaattccatgccccattgctggcccgcccaccttaacgacagctggtgaagtcggcgctctcgaatacagtacgttatattggtataattctacttccagtggctaatatcctataaaatagtcagaaaacacactagcatccctgtccctcgtattcttgcctagtcttcgaataactcgaatgctgtcggtacagaatatatcatcatggagaaagccgccggtgttctactgtttcaggttttcgtgtgtgcttgatacaactctttcagaattggtcggaccttggattttctggagaatgccctttatcctttacgtaggagcaggtcgatacgcacgatcgctaattctctgagtatcaagcttggtataagattcaggctcttgcgtaagaatgccttgacactgatgcggaaggatgggtcgcaccaggattggatgtggatgagaagaggacgcagaatgagaaattgttgactatgtacattgaaagcgttgctggggagaaatccgaagaagaggcgagagccatatggcctttcccggtcaaggcaggagtatgatttgagaattttattatactagattgacagataaatagaaagaattctggaggctgtcatgatattttttacctccataggaaaaccggaggaccagctgacttaggccatggtaaataacgactgccgtccctctcaaccaccaactaccttaactttataccgcacaaaacctggagctaatgtatgaaaccgggtctatgtatatctcctgaatgaaaataagggaaacgggtttagattatacttagatcttcgtagacagggcagtcctccgtatggaaagtactcttggtcactttcaatacatttttatctaagtgaaggcggtttatagatgattgcctggggatttaagactcttctgggtcctcgcgggctgcaatctagttagcgcaaggatagacggtaagtcaacggttacaccctcgtctgctggcacaagaaagcttccatcgattaaattctcccagaactctgatgtagccattatctcagtatcggtaacagaaccaggctgctccacctcatcatagccacaatcctcgtcaacgtgaatcacgatatggttagatgccgagtccaaaggagcaggatcatctctaatcactatgggattggtctctgtgtctgactcaggagaatcgatgaattcgcatatgaccacagcaggtcactctgaaggttcagctgggattgatgttaagatcgcttcttcccaggttctgcaaattacctggtcgttccctttgcattgtgtcgtctgaatttaagaggtggatcttgattcaaagagtgggagcactccaagaggagatggtatcaaggtctttgtaatttggagagctgtggtcggccatcgatttgttggaaagggggagtcatacctctacacaagtgctagctcattcccgaatcagttttctatacagtaacgccgcagaatccctgccactggtttcgaagtactaatttattttagccaggggcgcttgttatgagtcatgcgacgttaaaaacatgattccgatgcattatgccatagtccagggatctgaagagaccatcgaagctttgattcaagcaggagcatgtgtagacgctggcaccgtgaggaagagatggacacgaattgaaaaatctggcagatggaattaccatctttcacctggagaccaaaaagcctcgggaacccggacttctcatggcttaactccacttcattgggcagcactcattggccacccggcaatgatcaaatatcttctttccaaaggagcagatcccaacaagtgttatcaggacggcgacactccgttgcaccttgccatccgagcagatatcattcgtgataacaatgatgcttggaattcatcttcgtggcgaattgaaatctacaatgatttagttgaggctggaagtgaagaggctgacgatgcgcgtcaccacgtatccgaaattcgctcggctgtaatcgaagttcttctctcgcatcctagcatagacgtcgatcttcagaacgagcaactgcaaactccattgcacctggttgcatgttgcaaagatttctcgatggtttctttttcaagattgatgatcaagaaacccgataactcaatttgcaactacaaaggacaaactccattacatcttgccagtggcgcagggaaagctagaatggttaaacatcttctcgctgcaagagcctcagttgatgttctagattccgaaggatcaagtccccttcaatacagtgttcgctctggaaagtctgctgcggctgttgtcaaactcttactaaaatgctatgacatgactcagttgaattcatgtactcaaaaagatggggcaggcaaaaatttgttacatcactatcttcaaacagacgctccctcccaaaagctaattctcacgttgttgaatcatggcgcgaatgtgaatgaaatcgacacagaaggcaattccccactcagcctttgtctgcgcacgtctaatttgatatttaaacgagcctcgatctgtcgcttcctattgaaaaatggcgcttccattttgtggactgatgaatcagggagaaatttggctcatgtatcgatgcttgcttatccttggatgccggttgatggagttctctcgaccctgtcagagttcgggatcgatatggcagcgaaagatccaaataatcggggcatacttcatcacggagccatgtatgggtcggtaacccaaggagttgttgaccttctacgagggagcgggtcacttagcctacatgatcgggacaatgatggtagaacccctctttcatacgcagaggctaagctgcatccgaatcggggattctcacggaacagacgggaattgactctcgatgttctattgaaggcggccaatggagactgaggaggatcctggccgatttcaatccacttgctacttttcaacgcccgtgcagttttatggctttctatagattggttgccatgtcgcccatgggactgcaacgagcttagtctatgtcgccgttgccgaaaaagtatttgatgttctcacggaaactgcgtatgaaatatccggcctcataactctcctttaaccgattacgccttgttcagcctgcagggtgaggcgggtttcacattcaaacgaggctgtctgccaatagttttcatatcagatacacagagcaaggtaccgcacaaatgactagcctgcccatcaacttgattcataaccacaccacaacgatgctgctattcctacggagctgtatgttgttatctacggccagtatcatcaccactggatcaattgagctctgctagccagtctttccatgtctcgagataaaagacaaaacgcgcaagactggccagcacggaggcacacaccctgcacatgtccagtccacacaacttgttcctagcccttgtctgtctcatccttttatgaatattgatcatggaaacaacggggactacggtcacaagcgccttgatgataaggccgggacgcgtaggtatccgggatcggttgcgcgatagactagtgtaaaatcgagggagctggatatttccgcgcgaatcaaggcgccacctcacagctttacagatccgaaggccgtttggaggtatcgacatgaccgccgtgaactattgcggtcatcgtcaaaataaaactgcctgtgttagtcgcatcaattgcgcttactgagcaagtaccggctcacgcgaatcgcagctaagccagtctgatcaatcaattgagccgagtaatccgagcccggtcatcttcggttccatattgaggctagcgcccttcagccaaggctgacgacaaggctctcgcgcggtgtcggccctagggcagattttcaggcccgctgcacagggacaaatattctgaaaacatgtagggcggatgcgcctgcatgcgcggaggccaaatataggtcggcggattgacacctgacgccatggtcgggcctgagaaggaaaacagggccggaggagggcagttcgaatcgttcgaattgcagacgcggggtcgcagaagagccgacgagtcacacacaggggaaagggggtggcggagctcaggagctcggtgatccggatcaatagcaaaaatgcctcatctgtgaggcgtaggggagaaagaaggcgaaaaacaaaatcggggctgttggatggagggggagagcaggggacctatatagtaccacgcacggggaggcataaggacaaagagcgctaaacctaaggggtcaagactaaacctaacggagcaattcgcagtccccatccgatatggtgtagtggctaacatcgccgtctctcacacggcagccgggggttcgattccccctatcggagtttgttttttatttttatttttttctttccttattgtatatagtatcagcatcatgctagtcacttattttgtatctggctttctcaaggaacaagaatgtcattggtggctgttccagcgcgggtggaatccatgagtcacacagcctcctaatggataccaagccacgatcgtattctgagtcattagcatcctcgagggctgatttggcctatcaccaggagttagacattatcacttcctgcgtactttacctacaggtatgactgaacgtggatcatcccagaattacatctccagccgtacagggctgagtcgcgactcgccaaggtgacatctagattaaaataaatgtgtttggcctatgcccttggggtgatatatataattcacctcggtttccaagttaaataattaaagtcaacttgaaaagcaaattgagaaccaactcgactatcagaatacttgaatcattgaaaaccatggcttcgaataatcagagcgatacagatgccgatatgattacggggcaagagacatcctcattcccagcagtgtcaacaagctcgcctcaaaagcgggatcagcgaagtgtttcgcctgaatataaccctaaggctggcgaaaacagactacgcccggctggaggtaggtagtttgaaacttgtatatatcgccaaccctgctaatcggactgcttacagacatcatcaatcgcattacctgggattcggcatttgaacgcagcaactatgtcatcggattcgtggaccgatttgaaggacaattggaagtcaccatgggcagttggaagaaggagaccaccgatgaagaattcattccacagcatcgggtgttatatatccgacacatcaatggggacattgtttgggatcgaaggagacgtattgacaagatctttttgagtggaaactcggcgttcaacgaattggcctttcttgtctaaagattgaagtgaattttccgtcgcaccttctgtttttcctgtcccttcctaccttggaaccttggaaggttgacttctgtcgtccgttgtctctgtcattttagaatatctccaacattcatcacctcatgctgaatgacacaatgggctcttctaagaagaagccgtctttacctcgcttgaccaccaacatccccctactacagaaaccaactaatgcatcatgcaatactttgctacccaagacccttccggatgccagtgtacccccgatcatcatgccagagaggccggcaagaacttcatcacttttcaaggaggacaagcacgatgaggaaaatatcgtgcccgtcacgcgttttgcgtcagagagcatgcctgtctatcttccccagaaaagtgtggacgattcgccggtaacaaagacgaagaaattgtactacgaagatgcatttacggctcgtggatcgcacaactcccccaaggaccgtgtgacccatgaatcggtggttgtcgttgagctcaagaccaacaccaaggtttgtaacgtgctgaaattcgctcgatgattcctctatgctaacccaccaactagccaaaggataacatatccaagttactgtcagatttcgcccacctccttgctcaggtctaccagcgcccggagacatcaatgctagtcaccatcgaccaaaacgctgacttgctttttggaactacctccggttctgcatatctcttgaaggttactgctctctcgagtttgatcggacccctcaccaacctccgtaacacgggcctaatccaatcaatcatccaggaaatgtttggaattgcgcctgacaaaggagtggtgatctatatgcccgcgagtgaagacaatattgcaacgaatgggacgaccgccaggagtgagatcgaccgcctcgaacgaattaattccagcaataactcttcgatcttcaagtctctctcgcgatccatgagtcgtcgcatgaaatcgagcagtggaaacagtattccgatttccctcacttcagttatgagtcctgacgttgcaacccctacttcaacttctcctatcgcttttgcttcagatcaggcccctccgctgaggtcaaaccaagcagacgacaaaaagccactacaatcaccaaatgcggaacggacccagcaggtctcatccaaggacgagaaacctgaacgagttttaaagaagagagagagcctgaagagttttgttaaccgtcgcttgggcgagttgggcgagctgactacaatgaaaccattcacaactacaaagggaaagaaggattgactgctgtttgagaatcgcaaagtacattgcagtggataatgtagttgattgcattggggtatcttcttaacagggtttcggcatatggcttcgctgtgtcagacaattcagtccatatgattataccttgcatccttggccaactcttagcacgaaattgagtgaactgacctcttgtcaatgtaatatgtatttctgtttcgcttttgcttcttgaattctaaggtttctatatatcatgttttttgtcaagttgttagagatactttgcccgtgagacggtggtagtttagacgatcatacatgcacctatttctctcttatgatatttccccttatactgtccttacttctttcaaccccttatagggagcataagaaaatcacagttcccttatttactttctcgtccacaacacaacatcacccaacacaatatcacccaacacaatatcacacaacgcgatatcatgtctgactcagatgaaaaccaggctacagcgattgaacgcgctgatagtgatgaatcgctgatcttgatgacctcgtctttgcctgctgtcatcagctttgtccaggaaacccccggaaacctcttcgacgcccccaacggcgctgctctgatccgtgggagccccttattagggaccctttatttcaattagagcctcactaacctagtcaattcagatgcgtgcaactgccagggtgtctggggtgcaggaattgcccgtgcatttcgtgatcgggttagtcaatcattcaatcacccacttgacaccatagtgtagagctaacaaggcgatgttttatagtatcctgccgcctatgatatctaccgcaaccattgcctcatttacaaaggccacccagttaccaacatcatcaccgacctacgcgatgaggacccgcagccctctttcgttgtggaccatcccctcggcaccgcgctcatcatcccaccccagcaaagtgatatcctcctacactgccggcgccattggattatctgcctttttacctcccagaaatatggcagccacgtggattcggaggatatgattgtcaataacacttttgctgccctacaagacctgagtgaacagctacaagtgctttcccgacaggctcccgagaccagtagtgagcgacctctgagtctctactctagccgtttctgcactggcttgttccgcgttccctggaaccgcattcttaacttgatcaacacggttggtctgaacatcaacgtataccacccctttgcgttcagcaaccgccgcgctcgccccgtttgtatggagcgtcccagagacagttaccaggactgagataatcaaaggatctgtttcctccccatcagcaaggattttggctggtgggtttctacctggtggtgtgttgtggaggagcgagggttaactcattctcattttatgatgacaattgaagctagctaccatggaccgagcacatgcagataactttgatacacgagaagaacaaaaaaactagctcaaaagaaaaaggagaatcaagcctgtcgccactagcaaagtatgttgtagggcctccccttatcacctgacagcgcgtactgtagatcgcgcccgcccgcgttgaggtgtctctcgatttccccaagctttaccctcaccatatacctacgattcccaccgtattacctatcgcataccttctgtgactctctaggataccaatatgcccggtgaaccaccagctcaaaagcgtccacgcctccccttcaaacctcccagtcgtacgaatagctccgcgccaaagcccaaaggaaaagcgaaacaaaccacaaaagcctccacgtctactaccgtgcccaaaacaacaaaaagcaaatccacaagcattgggaaacgcccccggcccgattctccggcagctaatgccaatgccaacgccgcctccgaatccgaatcagagtacgattccaatggatcgggccgcagtcgttcgcgctcgctctcccaggagcccgactatatccttgctgaaatcacaactgcgaaccaagcagaggacgtgacgtccagcgacccaaaaataccttcgaagctgctcacacgcctactgcatcagaatttccagaatgagaagaccaaggtcgcgaaagatgccaatagcgttgtcgctaagtatattgatgtctttgtgagagaagccattgcccgagctgcttatgagagggccgagtcagatggaaacactgggggcaggggtcttggggacggcttcctcgaggtaagtcttcgttttttaatctcccaattggctaccattggtatgctgattgatattctaggttgaagatctggagaaaatggcgccgcagcttacgatggatttctagcctctgcgtttctactaccaagggtcatggcgttaggcgaaatccatcatcaactagggcgtattatttattgttcaagataccacagcattggcagaatacatgccacatttctaatcaaacatcttcacacgcaagacgctcgcaagagtgaaatatccctcgggttcgtatactcaggtggctttccaacggtgtgatcctcaacaaaaggaggcactgccccgaagccattggcattgtgaaacagtgcaatatctctgttaaccctctttgataaccaggcgtttgccacataggccgtgttctttttgctgagatgaacaacagcaacggggagcttgttctgctcgggtagatggccgagcttggcgtcgtatgctgtgtggcagatgtcgaagacgaagaatacccgcgttcgccacttctgagctgccaccagctttgttgttgggtgaacttcttgtgggatgtagatatggctttctttgaggaggcggacggcttttggcaggagggcctctgggttgttttgggctttggatatctgagaactccggtgcgagactatgaccaggactcggagggggtttccctgggacatggtgagctgaagatgtgaggagtagtccctttgaagggttgcctggatgggtccttaccaagatagacgagacggaatgtttggatcgtctctacgccttttctgtttgtgttcctcccgtgagggtgcactgctacataccaggttttacagggtcctcgagcagagttaaagtaaaaaaaaaaaaaaaaacttcctacatccatgaggcatatggggggcaaagtcggcgtctcacctggactagatgataaccttccaatggcccgacggtggatctggtcgttcaaactagaacatttgccaggggatggtcatctgccactgagtacaaacatgctgacagttaaggaccagggtcttgcttcagctggatatcaacgctgtcgggtacctggtgactgggttgagaggtcgggatgggactcgggtcagtccgacatcaaattatgtacaacgtagcaagcccgaagtacgcatcggagatggtaaaacaaaagtcagagataagacaaaaaggtccattataatttgaacgcaagctggatgtcgccgagaatgttatagttgatagtggacagaaggcggtggctagtggattttcccccgcgcgtgttttgtttcttcaacgcgtcaagcccagcccgagaagaccaatcttttcgcgatggatgatgcaacgacctccttgctcactgagcactttagttacacacccttggtaagcctatcgagactgatacgcatggactcgtgctgcatgcgcgacctacgagttgcgactccggacccaccccttgcaactaggaatatcgctgacagctccctagtctcttatagatgacattatcaactcgatcaacaatctgatttaccaggcgatatctagcttggagtccggcctcctcaatacgccacctgaacggctcggtttctcccatgacagcagtggccccagcatcgcggaaacagacgaggatggcaatgtggtttatcccgaggcgaagctagagatcgagaatggattgcatcagctagagacgctgctggagaccaatgttgataaggccttcgacaaatttgagatctatgtgctgcgtaacattctcacggtgcccggagacttgctctcttgggtgcggttgaagcactacgaggtatgtggaggctttcacagttgtctagacctgaacctgcttgctgttttgtaataagggatatactaatgcgccttgtgctagggtctctctttcgtatcttcgccagacacaccgacgccagaaaccatacatgcgcaacgcaagaagttgttcgagacaaagaaactaaaccggtcgctaaaagaagaacgcgctcgaaatgatgcggtcatatcacagctacaatctatcttgtcgacagttgaaacagcgaaggtagatggtgtgtccaagacagcggaagacataccagtggatctgtccttcttgacctctagcccagctgcacgccagcttcgtgttggtgtcgatgctgggtcgaatgctaaacccacacctcttacaaccaacactactttcattctctcgcagctgcccgcgttgcagacgacacttgaacagctccgaccgaaattggcagccctgcccaatgcaacggtacaaattgaagccaagtctaagagagatgagagaaaggaatatatcgagagcagaattcgactccatctcgagcgagctggtcagcttgctgtgggtgatgatggaaatccagtggtcgcaggtcgcagaatcgacatcagagaggcccacgcccttgaaagcgtggcaaacatgcttacgcaagacaaatctgtgtaagagaatgtgcgtgtgaagaatgttttgttctacgattctattattgaatatgtacaggtcgccttattaagaccaggtgatgctccatgtttcctgggtctttctaaaggggactacgtcagtcttgtctgactggaggatctccaagatcttctcgcccttcttctcgatagtgatgaattccttctgctcctccgggaggccatagaaggaccgtccgaacttgctcatgaaaccctcgacaatttctggcgtgatctcatcctccctgaggactccgttatcgcaggcctgctcaaacgcatcaatcacaacctgagtggtgtatggttgggtgaagactccagcagcgatcttctcgccaccacgcttggatgccgccgggtgcggggcgctgtcggagccaaagaaaaacttgggatttcctgagacagcagcacggagaagggcatcgcggtcggctggggtcttagcaacgggcttgcagaagcagaatgggtcaccggcccacgagtcgatgataatggataggtgatgggctgtgatggtaccagaaacggtgggaccgcacatcttcacggcctccacagctgcagcagtggtacagtgctccaaaacgatgcgcagtttagggaacttggagtgcagctcaaagagcttggggaggaaacgctcttccgcggacaagaccgtcacatcgcctccggaggggctttctccgtgcaggttcagaatcatgttttgtcgctccatctcctcgaaaacaggatagaattgcgtgtagtcgaccacgcccgcagaggaattggttgtcacacctgccgggtaactcttgacaccgacgatgccgcgcttcttagcttcaacgatagtctccgaggtcacggtctcgtggaggtacaacgacataaggaagttaacattcggctcgatggcttggaggcgcttctggtagtccagagcacggtcgacggtcgtgataggtggcacaaggttgggctatcgagtgtattagatataactcaaaagctaggatttgtttcccaataaagaaacccccttaccataacaaaaacggtgttcacacctccctgtcggatagtaggagtcaccaactccatcattggaccatcacgaagatggactatctttggtcagcttgcatctattaatgcccagaatttcttagtaccatggaagtcggccgaggcggggagctttactccctgcagcttggagagagacatgataaattccaatcaagatcaagctcaagctccaatggcaaaggttatatccctgatatgttcaagaaaaagtcgatctgcgcttttgccccgccatttctgaaaaaattctgccgatggcggtggccctatttggccattctccagattcttggattcttggattcttgtttctttatttcttgatttctcagctgattctaagcttgaaaatacaccgaagagtcagaggcaatgtgtgaccataacatgccgaactaatttgaaagaatattccagtcttacctgcgcatcctctccgcacggactactcaccgtggcacgtccggagtgtactcaggaagaaacagggaaacattgatattcaaagaccaaggcctagatccgttcaaggaatacgagaattcctcgaatcaacaaggcaagggtgtgttcctgaatcaccgttgccgctggtggcccccaggcacaattctcggcgcttcgccgtcacctatcacaggccacgatgaccatccttgggagaaattagattttccaaaagacaaatgagatcggttcttcaactaaaaatcacaagaaaaccccgctcagactctatatttaggtctactaggcgctttgttggttgcttgtcccccgatgtgtctgccaagtcgccgagtctgcaccctggcgctcaggcaattatactccggggatgtacaggtccagttgcaaggccaatgtttaaaattctagacagtcctgcaaattcaacctagagcctaaggcgaatcagcgcggtctattaccatcgaggcgccctacatggcgctatgcagtaatcgggctgaagatctttgggataagccctcattcggtggttactctcttgtgacagcaatagcgctcgctaagatagtccctggatcaagtttaggctattttccacgaatatacatatcccgcctggtatccgtcaataatctgagtcctgattgattgtatccgaaaagggtgtatgctgggaaaacaaccaaaggaatccgagcaggagacaacgcctctccccggagatttcagaaccaccaagtcatctcgagcagtatcctggggatggaatagggctgggaaactcggactgatgccctttatccggcactaatcaactggtcgggccatatccgcattatgacccacctaaatgggcctgatggaccgttgagtcaggagccgtcatatagttcaaagcgtccaatgcattgccactccagtttggctcgtcaaaagtgtcggtcaaatcacagatcggaacgtcatcgttcaccacatgagcggtttccgctaagccttgcgcaactggtagtgaggaaagtaatgtttgcaaagcttcaatggcctgaagcctccccgggcttgagttgctcgagaacactccattgtcaagatggagattcctttcgaaatcatgcccatgctagtatcaagcactggggacccatctggcttgaacgtgcgatatttgggttgagaatatatgcaaatctggatgaccagcatggatgtaagttcattatgcacggggggcctacctgtcgaacaataggccaaataagttctcttgaggaaatctggactctgtccatgaatttggcgtgtggcattggcaacatattcatcgatgctcaagatcataagcaatgtcaatgtacaacatactcagtagcggagtaatcaatggcaccgtgaccacttggatcatcttcatcaatcccgtatatctgtgatgagttggtttcgcacacgggacagaatgctgcccatttctggatacccacagcaattgtgccctaagcgacacagcatcagcttccagataataccattctagagggctaagcgttctggttcgtcagggttgtgggcgatcagcgggtttaatctcgcggggttgaatcaacagtcggagatccgaaggagtaacccggtcgatgcaacctcagaagacgtttcgtcaggcttcttcagacgaaaaccgtcggagtctgctttagcgctctaatgcgtggtgcatttctgtctagtcattggagaaaagggagaaaagcccacaattcgacttgccccgctcggtgatcgtcgcctacttcgactagcactactgtgcttcatattattttcaccgtgatgataggtgtagcggcgacatccgagaacaaatcagcgtcttcttatcggtacatgtgctaaattgactatgtgcctgacgatgtttatgccaagtatggtccctggactgaagcataaaaaccgtccgatgaccctcctacatctcttcagtcagctcagcaattcactctcaattcaatcttgacaaaatgttccaatctcaatccgcaaagggcatgttcgccctagcagctatgagcctgatcagcggcacaaccgccagcctcgaaacctgtgccagcagcaccgccttcagctgcgcgagctcctccacatcgccaacatgctgcttcaactacccaggcggtgccctcctccagactcaattctgggatactagcccatcaaccggtccctccaactcatggaccatccacggactgtggtacgtagataccgttatgaatacctgaaatcataaactaacccctccccatccaggcctgacaactgtgacggcacataccaggccagctgcgactccaaacgtgcttatacaaacatcacagcgatcctgcaagaccaggatctcggtgacctggtcgactacatggacgactactgggttgatatcaacggggccaacgaggacttttggtcgcatgagtggagcaagcacggtacttgcatcaatacaattgaaccgagctgctactccggctacaaggcgcaggaagaagtgggtgatttcttccagagaacggtcgatctgttcaagaccttggatacgtacaaggtatgtcccctctctgcctttcattatatatgctgttcgtttctgactgtgtgccaggctctctctgctgctggcattaccccgagtacatccaagacctacactctcagcgccatccagaaggctcttactaccctgcatggtgcgtcggtttaccttggctgctccagtggcaagttgaacgaggtttggtatttctataatgtcaagggcaatgctattgacggaacatacaaggctgtcgatacgcgtaagttttatcatttgcttcttggttggtgctttactgacgtcttggtcattctagtcactacttctagctgcccaacgactggcatcaagtatgtgcccaagtaattaaggaacagggcttgatgtgttctgttggtgattgtccttgctgagttgcacactgaaagtgttgctaaatggtatctctggattattgctatacatgttgatatagattcgaattctcgttagtctcatatgatgatcgttttgcttgacgataaagtctcactgggtatagatgtagaccggtgcttatacggcattgaccacgtggtcacactcaggcgcgaagctttgaggcaagaatgtcgtaaatgcatcctggccctgtagtggacataaagcacaccgtagtattgggaatcggcgaggtggcgggaggtcgagaggtcgccctttcaatcggagtcgagtgagccattgctcaaagtagaggtacccgccgagttttatcatcgcaacgaaacatagcttgcacaagtcttgcagagatttctgcaataacacaactatgtatgaagccatacacttgttgcagcacgcgacaggaggaagagtgtgtttgaagccagaaggggtttgggcagagagcgcacgagtggtgttttcatatacccttgagccgtgcagcccgccgttcgtcttccctcttgtcttccacgcgacccaagaaatccatgcgaccaatataaccttccttagctttgctatgtgtgcgcagctcgtctttgataccggccgagtcgacgtacgaggcccagtcgagtcttgacttctccacggtgttgatcttgggtccgcgcgcatctttgtcatcggtaacgagttgcttttcccagcttttcttaatcgtgccggtcggattggggtcaaatcgcgatatcttgcgaagcggtcgccgaaggttacgagcggcatttgcggctgcagcatcctcgtcggtatattcgacattctccccactggacaaaaacgctttagcctccgccgagtgtttgggcacgactttctcctcggtgatccattcgccggcaaatttgtaggtgcgcttgatcttgatcatctggtcggcgtgcacggtatggcctattttgtgctccgcatcttcggcaccctggtcctgtcctttggtttcgcctgttggttcaggttcttggtcggattcggatatctgctgggtctggggtggctgcaagccggtgtgggtctggggggcattcatctgctcccatagagcgtccacgtccacggtcgcgccgtcgatcctggccagcggtttgcgctgttcctcctgtctgctcgtagaacgcgtattagaacccaatattaagtcaagcagcattgataataacttaggacttacatgtgttgtttcattgcgcgtgtccgcacgaatcccccggttcctccttcattgtcgtccaagtcaatgtcgccatcgtcttcgtcgctatcgcgcgcgtgttttcccttggccttcttccccttggccttcttatctttcttctcccttgcttttctaattgtagcctcatctccagagtcgagttctgcatccttggggatctgagattgggtgtctgtctttcgcttcttctttactggttctgcggcttcatcggggtcggaagataagtcggagtcgtccggtgccgcgtctaagtggaagtcttcatcctcggcggagtcatagtcctcctcatcaagatccagattttctggcaaagtagcatttgccattgtcaatcttttctgcttgactgggcttatcgagaggtgatccagatctttaggacaaggcgcaacaaggtagaaggatgaatttctgccgtaggcggtgtcgcagctatgtatgtcatctccgttgactccattgacaataagtatgtacatcttctatgcacatccatgaacatctagacagacctctagctttcagaggcacctgtcaccatcatttatttttacaaccaaagctctatagcagtcgggaaaagcataagcccctccacagtaatggcagtcccaatgtcgaaacattgaatgcatacaggcctacacatgtggatgtataaatgagttaaaagacttggtaattgattcaatggttcatgatcagtagaagagataacaattcacgttctgatagaagaacagcgaagaagaaaagcctccccaaaacggactgcaagagtgcaaggaacagaccgtccgacgggctattcctcttgggccaaagccagaaacagattcatcttgtcatccagattcagccgcaaagggccatcgtactgagatcgcacggatttaaggtgcattggggtctataatacatatgatggttagtattatcctagtatcgtgatcggaaggcatgatgagaaagtaggaatggagggatggccatcaataaacaactgttcttaccttcgatctcctccagaccagtctggggtgcggcccaccaattggattcagcattaacaacaggctcggggaccacttcacgggccacgaggttctgctggttggcatcgcccgctgcagtgccgtggacagcgtgaccacggtgaacaccacggtgagcagcacggttagcagcacggtaagtaccacggtgagcaccacggtgagcaacacggtaggtatcacggtaggtatcacggtaagtaccacggctacggccacggccactgccaccacgatcataacggctgcctcgcacacggagagggccaccttggcctcgaacccgggccaactgttctccacgggccgcctgatctccattggcggcgccatggagggcaccgaactcatgctgtataggtcatgcacgtcagccatcatgcactgctaccatcccaaagaagaattgtgtgtatgagaaatgggggaatggggtgaatcttacaaccatctgggcttgaactgccagcagggtgagctcggtaacacgggcgtcacgagcagccgagggccgcataccttcctgctataagtgatattagctcagaacctcgaagctcgggctgaatggcaattggggtcatatcgtacatcaacttggcgttgaatggcctgcgacattagctccatgatgcggttggcaaggaaagtaggggcagtgggagcaataggctatgaataatctcagtattgctctacaaaggttccagtagtcaatggagcgttcaatcggcttacattgcgccgggagcgccagtcatcctgccgacggcgctgggcggtgctgccgccagggccggcagggccggtaggagggacagcctgctccttcattgtcacacaaagacagcagagacaaaggaataaagaaagagatgagtctgctcgctgtgtttattcacagcggatgaaaaggtgtgttgtgaagagaaagggaagttcagcgtttacgtttacgtggagctggacgtggacggagttttcacgacaatacgtgctcatatttacgttttatgaccaagatattgctcggcgtctttgctcggcgtcttttttgattgaaacctggagctcccctctagcttgcggctaatgaatgacttactagtttcctgccagacaaaatccctaatcggcatgatggacaacaaagagtgttgaatcggtgccttctgactctatctagggttagttgattccggctttgaacacatactctctatggctaggtatattctggccaaaagcattgagggatgttggtggcgaagccgtcgggagaaagaccatgctttgatttcctatggaagataaaggtctatctgaccagaagaaagacctagaagcaaataagaaaggcagccatgcctctagcagcagctattgtcactaatagctagagtatacaacgagaacaaggattgtgaagtctctttggtgatggatggggtttgaaagatggcaagtatgaggactcctggctttttatcttcctctatgagcatactgcttgtggatatgatgacctcggcaactctgctagtatgcatggagtatggatggatatatggtggagtcggcctataagcagccgcgttgcttgtagtaatggtaactgcacatttccgttgatttcatataatcaattatatatgtacttaacgaagatagaccaagcactcctatggccttcaaggcgaaatgagacatggctgggttgttgtacgtacgacgactcgggcttttttagtctgaggtcattatgttgatctagcttcagcaggtacgatttatatcgaccttgtgatataaaaaggcgcgaagtagttggatttctattatctttctgctatggtagactacatacagggatgtctttgacagatatcatggcgtatcttctaagtatagaaacggagaagatatcgacgagggatatttggggaacttatttgcataatgtgattgtactgaacatttaaaggttcctaatgcggctctggccattcatcattggccaacgcaagcagaggattcgactcgggaatgtaacccagatctctggaatgcgacatccgaggaagttatgatgccggggaagaacatcatattatcacctcccatggtacctcgcaaacttttctggatcagaaaaccgctttaggcgaaattgtcctcttctggttcgatcttttatcttcaaccaaacttgttgtctagatgttataccaatccggcacacgcaaagagccaacctttctggcttgacttagtcactgttcctctttaatcttcgtagctttcttgatcataattgcgcagaaaatatggtgcctggttaagaatgtgggccctggtatacttttccacgtgcgagctttgtacaggctcgtgtcagcgtgccgggaatagacacggccttgagagagcatttaatggttccattgccttgaagatggatgtaacgttcaaaatcctggtttccacgcgcccaatataaggtcttaagtgaatctgcttgaacttgaacttgaaatttaagtttcaacctctgatctatacctaccagggtgcatattattcaatataaatttgttcaatatcccaatgcattcttttactactcatctctcccttctatttgctgcatcggctacccttatcgccgctcaagatgccacatcccaaagcacaagcggcaactcgaactgtgcttctcaaaagtaagctcataagcctatgaaattctgttgagattcctttctcataatcaacagagttgtagattcatgcgttgcgataatgaaacgtggactcgcaaagtgtgcctcgaatgattgggactgcaagtgctcgggggctgcaaacattgccaagtaagtaggccacctacttgactctcgtaattcctcaatgagatgtctatacactcaacaccgcagtactgatataatcgagcagctgttacgtagattgctccgatgatgacccggattcgttcgcggccaaacaactgagtgtaaatgattgcgctaccgcaaatgcatacgaccaaggagagactaccgtcgcaccctcgtggactcttcctggatcaaatgcggcacagccaaccgacacagatgctactttgaccactagtagcagctcgtctactactgccggaccgactaaaacctttgcgaatgagaagtcgacgagtccatcagagggagctgcggttgtgaatgatgctggtagttggatggctcttgtggttctagggctaggggctgcattttgagactggggtgtcagaaggaagtgattaccgagtttacgtgattattagacctaattagatatacttgtaggattgcattgacattggaatattcattctgcgatataaataatggagatggcatatgtggagcaaacaacctccttgagacttagactagatacatattcgccctacaccttggttgcaagactaacccttctcacaaaataacagaagccacagaagtaccagaccagtgaattctcacctttcattaatcaatgcccagcatagataaccatgagtacatcccttcctttcaacagagtaaccattataaatcaacgaagcaatgtcacgcttacacagcgcttatatcctcccggagtcattctctcatcaattgcgatacacctgcttagtagcaatctccaacttctcgagttggaactgctctgcccgatgacgagagatatcccgttggaaccacgtaccaacagcagcaacgaggcccatcagcacctccattccaacaagtacgcacagcagcacaaagccagcacgagtattgatacagtcacgatcgaagtggcggggtgtattaatgctgctcgtcccgtttttccacttgcaggtccagctgtggagggtttccttcttgttgaaccctgctgggtaatcggaggacggcgggtatattatgaacagtatgccggccagggcagttacaaaacctgcaacggctgaagctgaggcatagttgttaagtgacttgataccagaatgcggctggatgagagttagtatatggaatcaaacacagtgcagtggaagggtgtaaaactcacagatggtaggagggtaagggcgatgtacaccaagttcaagatggtgattatacagccacatgaaatggcggcggttgttggacgaagatcaaagttcaaaggccacagtgcgaggccggcactcgcccactgggaggtgttcttataatgtcgcaagggtggggcttcgcacgcgacgacggcaatagcaacgccgaagattgaaaaggatagaccaagtcgtgcaaagtaaaggacacgattgcgtttgaggaattttgattcctccatgtatgaagaatgagcaccgcctgatccgtctagggacgagtttgagatcatgatgagagtgtcgttgggtttcgtgagatgataaagaggggtcgaaggagaggaagtgtgtgtaactgtcaatgattaccttgctggcaaggatccttctggtaattgatatgaaagaacgaagaaaccctcgggacaatgatggaaaagtggaaaaagcaaaggtaggtactattttcaaacaactgtctcggaagcctcgtttcactatcggactgggccaaacacttctgttgtggtggtcacgtgtcgatcacatgctaatgcctgggctatcaggcttcacatggctaattaactagctagatctcgatcattatagataatctaaccttcttcatctctctctcgctccaagaactttctagccatcgataccgtcaacactgaaggtgccgaggctatacacgtgacgctgtttacttagtactgcagtggggtttccgaccagagcaggatgaccaatcggtcatgtgatcactaaaagcactctcggcaacgcagacacccagcgacgactctgctctcacacctgtttcgcaggcagggctgtcggagctcctgtcccccgtggcagggtcccctcttcagtatatatatttatgatcaaggaacccgctgaccgggtctacttattcggttcccggaataacatggaccctggggatgtcccgacgtttctcccagagctaacccaggtcgaggaaatgctggtatctagggtacataccattattgaagtcagacaggtacgtggccagcaatacttttatcgcggccacgtggctcatttcctgaccaatgtacccgtttcctaaagatctttttctccgtctttcgctgcccagatcgcaagaaaaatggcggaggcgtttccaagtccgcgtaagcgacgccgcctcctccaggagtcggaggttaatgaaggggatatggaaattgaacactacgtccatcgaactgatccatttcgaagcattagcttcccgaatcccgatccgacagcccttaacgtcaccaccatgaccgctgaggaagatcctacacaacatttgcaccgtggcatcttcaacaccctcgaccagtatggtctgccagcgaagtcactttttcatatgttgaatgcaactatccccggtgccagctttcctctgcttcgcgttgttgttgcgagtgatcattcggctctagtacccctggggtccatcaaagacaatcttactacccttctcgacaaccatagccttccacagatttaggtggaggtgatcaacggggaccacttttatatccctactttgttcccgatccactcaacagccgagctttccattgcgtttcaccatcttaaggatgagatcgtccggcttctcgacgagactcttggaaccaaatggcaactggtttgtccattcaacattggcagggattcccgttccgcgcggccagcccttggtgttggtgttctaccctcaacaaatgcaaactggtatcagcttcaagcccacctgacgcatcgacttacatcacacatccgtcctatttttacagacatcgagttcctccctgggaaactcagcctccttggggagggtgatcctgtctcatttaaagatcgcgtcaaaggtcctaaggatattcagatgggatgttcaatcggcgttcgaggaggtaataacgctagtaccttaggaggctttgtcgcggttacatatgacggcgaaacgcaccgtggcctcctgaccaactaccttgttatgcgcccctcccccccatatgctaaccttgatacaatcaatcgtgagggcgtatctcctctctcgcctatccccttccagggggcaatcagtatagaatctctagccaggatagaccgtgactataccctgaccgatcttgacgaccaactacaagccctggagacacagaaggctcgggtcgtagacttcatccggcaacggcagctcactagcgatgcacctcgcgcatcctcccaacaacagcttgaagccgttgaaacctgggagaaaactctgattgcaacgcgcccagtcatccaggcgatgccacacgtcctaggtgacgtccattctgcgtcgggcctcttagtccatggccgacgtgttattgattgggctttcgtcgagctaaccccggaggccgaggagcgcttctttaggcccaaccgaatgcccgaagtcccaaggaaccagatgcctcgaagcggcccctccggtccacctccggctctagtcgcagcaggcacccgtctcgacgaatttagctcgttacaggaagacacgtactatatcaaacaagggcgcaccaccgacgtcacaggtgtagtgtgcaacggtgtgctgtctgtttgcaaatgggcgacacgatacgatatcaatggtaataccgtcgacagcaaagatcttcgtacggaggaattcatgataataggtatccaagatcgctttattgagtttggtgactctggctcatttgtcgtggattcgaccggggccgttgcgggcctcgtattcgccgaattcaaacacaacctccaggctgtcggactcgcattaacagtcccggatcttatggacacgatggagggtcgacttaaaggtcccgtctctctccgtctcccataatttccttgcttccatctgttttcattgccggaaacgtatttacgcaagagtagatcgcttcaacatcggctatgatctacgaatctcaacagagatagtgactggttcttcggaaccatggatgtttttttccaaccgacaatgatattattcttaatctgtctgtctttatgtggtttgaagcggtctgcctatggtcgtccttcgtggatcacagcgtgattctagtctatctgctcatcttcctatcctccgagtttgctgcctcctgattgtcttcgcgacggattatactggctacgcatgcctcttttatgagaatattctgctttgcttcatttgctaatggaaattgctctaaattcattgcgacctaataatcttgaaaatcgagtaaatatccccgaatgcatgtatgcacacgatcgctgtccccccgccgtagtagtaaatatggtgtattatgcatatgtagagctaggttctatcgcgcgtaatcatcacgcaactatatagacgcagactaagaaaaagatagaagcaatagcgttacagctagtctcaagttcctttggacattgatttcttgccgtggcgacgggctacttgcatattaagatactgctggcacagcgctacagccgtattaggcaagggctctcttagcacttgattttcaatacgaatgccattttctatggtaatcggaaggggatacagctaggttcagaattgactatgttggtttagtgctcttcatccgtgtccgtttccgtgtctgtggagatacaacctcgaactcagcaagtccgatcgatccctcagagcaggaagcaaatcttaatggtacaccatgttggcatcggaagatctagcgacattcatggcgatatctgaaatagcccgagcacactgatcaacaggcaatcaactcagccgctcattaagttcctgcaatgcgcccgttgtcaatgcacttcgaaacgtaagtgcaacagcctcagcctcattccattgcgcgctaaccatatcgccaccaagctggccgattctcagaactcgggcttgcatgcccggacagtttctttcacaatggttaacattggacaaacagggcaccagtacctaggtattttcaagttacttgcagagacatgattttactcccaatactcggttgaattatgaaaagaaaggtatcgagcctactctaagaagtggttcatctctcactacagcctcacgatgtccgaataaacgaggcaacgtagaattgtagtagaatcataatccaccatgtcgattttgaccatagcggagcatttcactgtcttggcttcttcaatctcttacttttatctcacttgttgacaactcttactatttgacttctctcaattcttaataacgtttacttcttaactcatcttacttcttgaaaactctcacttgttgagggtatcttcgcggcgcctactccaaacgcttttagggttcccagctgcagaagttttgtttttttctttctgtagaataggaagctatagacgtagttacgacgtagttggtacagattaagcaggcacgatgttgcgtagaggggtatatcgtgtttcccccagcagcgtaaacttgtattcacaacatcgcagccatggcaagcaatatcaccaacatcattgttaatgtgttcccggacccccgtccacccacctccgcccaatcctccccatctccctctgcctccgggaccaatcggtccatgggccagcagttggtggcttcaccgggcttttgggcccttatgattgttgtcgccggatgccttgctggcgctggctattttttttggaggaggccagcctccaagagcgtggacattgagggtaccccgtaagtggtaaaccatgattctcatggaaactatattggcgggtctttgcctatgtatgcacagaggctaatatatcgtaaaatagcctcaaagacatcagtgtgggcgagcagcccaagcagaccagcgaagaaatccacacagtggatgatgtcgaggcccatccgcctcttgtgacccccaagactcccaagacccccgcgccccccaagaccctcaagactcccgaggcccccgcgccccccaccacacccaagaagaagatcccgagctacgcagaagtggccagcgccactacgacgacgcgcaatgtagcacacgggatagagaaggggctgtcaatctcggtatgctgaggcgatgccgaggcgacggcgttcctctgttgttttatccttttcttctctccgagaacctcagtgaggtgagatgaatgaaaacggagctttttatcaaaccgggggtggaggaggaggtgttttggcggcgttcctctgttgttttatccttttcttctctccgagaacctcagtgaggtgagatgaatgaaaacggagctttttatcaaaccgggggtggaggaggaggtgttttggcggcgttcctctgttgttttatccttttcttctctccgagaacctcagtgaggtgagatgaatgaaaacggagctttttatcaaaccgggggtggaggaggaggtgttttggcggcgttcctctgttgttttatccttttcttctctccgagaacctcagtgaggtgagatgaatgaaaacggagctttttatcaaaccgggggtggaggaggaggtgttttggcggcgttcctctgttgttttatccttttcttctctccgagaacctcagtgaggtgagatgaatgaaaacggagctttttatcaaaccgggggtggaggaggaggtgttttggcggcgttcctctgttgttttatccttttcttctctccgagaacctcagtgaggtgagatgaatgaaaacggagctttttatcaaaccgggggtggaggaggaggtgttttggcggcgttcctctgttgttttatccttttcttctctccgagaacctcagtgaggtgagatgaatgaaaacggagctttttatcaaaccgggggtggaggaggaggtgttttggcggcgttcctctgttgttttatccttttcttctctccgagaacctcagtgaggtgagatgaatgaaaacggagcttttttatcaaaccggggggggaggaggaagtgttcttggtggcgttcctctgggctttttggccgtttttgcttctctccgaggacctcagtgaggtgagatgaaggaagaaaacgagacttttgtctctactttttgttgttttgttgtttctgttttctgttgcttttatttttatttttctttggctggtcctcttcggaggtgaccatgtctaaatacatactgccgccgggtagtttcatcttgggaatgcattttgctgttcaatgtagaccccttcgcagacctggatcttatggtagaccctgattgatctaacacgagactttgaagaggccaggtgctaaaatttcctttatataaaagttttctcttagatgtctcctagatgtctcttacctttggctcccattatttaacaatcatctttttcttaaactgtaacgtccataatagttcagaacttttagggaaatatttccgctatagaatctaaggacaatcactagaagtaacatattgaatgaattaactacatcttgctatagaaacccaagcatctaggtagtaaaatttcgagaatatagggcactagtccctgatttatatatagcttcatacacggggtgagagaagtgttttcaactggacagcattaggagtttcattgagcaaatccattcatattgataattcacgacgctttaatacaagataaacagcaattttcagtaatctcatccaatgacgatcacttctagtgagacccaatttctcctgacccttaaagtcgagctaaatatttccaaaatttcttcccaaaactccgaggcgattttgcgatagcaccatcactcgctttccgaacactagccgccatatcataggatggagggctttggccaagtttgtcattcatattattcacctttgaggactcaagtaaccgtccagaagagcaaaagtagtcaccgcgatcctgagagttttgggctagctctcttcgcatctggctgttgggattctgctttaaagaagcataagctcggttgaactcactgtcggagagtctttccatagcgatatagatttcggggtttcctatgcgttcttttagaacatttgataactttataaccaactgcatctcctctttcaataacagaaagaacttttcaaggtagtctatcattggcggggtaccgtcgtcgtgcgtagggtgattctctgctaacttttcgagctctgtctctagttttataaactgttgcagtagtaaccggcgagtacgctcgttctcgatgacagaggtgagtgcatctgggctcggctcgcataagtggtattgtggagaagggtgatagtcggagactagcttcaattcttggcttccaagtagttcggacattttagagataatgaaacgattctcgtgtggtaaactttggtataagatagagaaggaatattgaatataatttgggatcgaggtttgaaatagtagaaagatatatctacctgggcatccttgatacgtatactccttgccgccgcctaataaggaatggatctctacctaaggtagcttccctcccaaaccttgggactaatccgagcccctctcacctttagcaattaatccttgatcatgctcaaccagggcgtgatcggtaaacttattttgcgcgtttaccagacaaaattggcattgggtccaaacctagcgacgccgaattatatcgttttggaatcggagcttgtaatcaatacgtcacgaagtcacaattcttaatcacagacagtagccctggagtcttttcgctctcaatattacaagaaatccatagaccagattgactctcccgatctactcatttttacatcgcgtatgtatccaaatcagtctcctgcttcacgctcagcatcatctttcgccttggaggctcgaagatgtcgcaatgtggaaagatgctcctcgggctgcttcatattttttggaagaaagcgccaaaatactccacgatactttgtttgaatgagcgcatcttacagaagatctaccgacacctctcactagtcgatcaagtttgtctatctctcagctgcaaagagctcttcgccctattcgggacgattgtgaagcacaacgatcttgaatttccacgactcttgcttattagaaatccaatactgtgcgtgaacagtcaggatgtgctgcgaaatcaactccttcttcgactcgaaaatcgccgctgggcctactgtgcaaagtgcttgaaacttcatccacggaaagaatttgcaaaatatctcctgagacaatcagccctggagagatcctgcgtatactatgctggtatagttgacctatgtccctgagcccaaagtcaagatcctcaaatcaagcacaacgccagccgaaaccaaatatggcccattcgagtatgactatgacaatggagaaacccctagcctcggccacgtctgtatgtttagcagatctggctacgatgtgcgagttgctctggttttatatattaataaaactggcaagttatgtgtagcggctcggcatactataagcttctcctcctccgcccatctcacagctgagccgacctttgcttgttctcatcaggatctcctatctctcgtcccagggaaacttactgcaaaagatcctcacacgtaccacattttggctacttcaagacctcatcagtatctcatgtctcttgtccccggggagctggtcccaaaagtctgtcccatttgtcagactttgattacaaaatacgatttgcctgaggatatgatgaatcaggctgttttctgggtggttcgagatttgggaagctgtgaatggcctgcagaccgaccttggtttgaccagtgtcgtctcgccggagcacggttttcacttaatgagatatactggtgagtttatcaaaggatctgtggagaaagaagagctagtactgattcccatataggtatcggtcgcagaacttgaatgactccagggccatgtgataactataaaagtaccccagaggcaggcttagacagcttcccacttctcttctcagtagtcaccccatggtattctaatgacgatctaactacgttgtatctgtaaagaggaaaacaactagtgtagattcggctaagatctgatggacaagagggagagagagagaggaagagggagcggaactatctagtgatctggacccacatgggtgaccgccttccggtcacccaacatattctcctctctagcaccctctcagtaacaactctgctctcacacctgttttgcaagcagggctatcggtgcccctgtccccgttacagggacccctcttcaatagctagacatcaaatgccaaggttgtacggagtacccgtggaatgcatgccacaaggaccgtgcatatatgcacgccataccaaacatagcttagcgtgtaaccttgatgatctataagtgctcgacgacctgcatcttcaatcgacagcatggtgcatttatatgagacatagctggacagaatcagagatgggatacaatggaagcgtctgggtcgatgcgtgagagtcgcaatgatattatccagtggcttaagcatgcagagtgtacactgttgcaccatctcttaacgactctagagactctctaggaccacactactgcctcaataatcatcagaagtaggttgagcctccagggtagtcacatgacttgtatgttattgctattgctattgctttttctttccttacttacctacattcatttatcctttagaggactcaaccacatcagaacacaatcacttcgacatgcctggtaactatatttatcatccaccacatgacttgtatgttctcaatgtctcttttgttctcgatgtcttttttcttttctgttgctttcatatacttacacttacacttcagacaaccctaccacatttgccctccgtcttccactttatgaggtctattctcgtctaatttcaatgatctgatttcatgtgctctcatcatactctacaaattggatgaaatgaggctgactggaccaagcatgtggtatcaaccatatccactcgaccacgtccagccttgccgtgacgagttatggttccaggacagcaaacacaaaacacaaaacataacaaaaaaacaaaaaaaaaaagaaaaagaaaaaaaacatccaagcactttcaagcatcaacttcaaacaatcatccacttcaatcaaccttcaaataatcatcccattcaagcatcaaccgtcaaccgaccatccacttcaaccatctacttcaatcaatattcaaccaaccacttcaaccacttcaactacttcaaccacttcaaccacttcaactacttcaactacttcaactacttcaactacttcaactacttcaaccacttcaactacttcaaccacttcaaccacttcaaccacttcaaccacttcaactacttcaactacttcaactacttcaactacttcaaccacttcaactacttcaaccacttcaaccacttcaaccacttcaactacttcaactacttcaactacttcaactacttcaactacttcaaccacttcaactacttcaaccacttcaaccacttcaaccacttcaactacttcaactacttcaactacttcaactacttcaactacttcaaccacttcaactacttcaaccacttcaaccacttcaaccacttcaactacttcaactacttcaactacttcaactacttcaactacttcaaccacttcaactacttcaaccacttcaaccacttcaaccacttcaactacttcaactacttcaactacttcaactacttcaactacttcaaccacttcaactacttcaaccacttcaaccacttcaaccacttcaactacttcaactacttcaactacttcaactacttcaactacttcaaccacttcaactacttcaaccacttcaaccacttcaaccacttcaactacttcaactacttcaactacttcaactacttcaactacttcaaccacttcaaccacttcaaccacttcaaccacttcaaccacttctaccacttctactacttcaaccacttctactacttcaaccacttctactacttcaaccacttcaaccacttctaccacttcaactacttcaaccacttcaaccacttctaccacttcaaccacttcaaccacttctactacttctaccacttcaaccacttcaaccacttcaaccacttcaaccacttctattacttctaccacttctatgtgtataccttcgactcgccgaggaagttgcaccttcctcgaacataagcgaggagcactctttgcatagtttgcagagaaggggacgcacaaaaccagaaggaagagcacagatggttttccttttctcttctctcttcgtacttggtatttgttcgaaaatgcactcatttctctgaattgatctggcaggtaacaatggggaggccctatatattcatgattactgattaacaataggtttttaaacctgcacaacccttcgatcccccctccagccctcgagtgctccggggtaattgttgtgacagagacacgccccgtacctgtccagtcgtctcctctccgccgtcgaggggccattagatagccaaaaccacctgtcagagaagatcatccggtaggattgcaactgcaaggagcgtcgagatgacagatttgcctacgcaagtttaacagagcaagggggtgtataattgtaagtgaagagtacttgtcatggaaaagggctaatatagtatcttggcagattttgaagagagatgccagagccagtgcatcgaccaggtgtttttactgtttttacttttttttagcttctgtggtattctttctcatattatatacatgtttgtctgcggagaattggccagcttgagtaccttcgcccgtaataccacacacgggatgaaggagggtatgaaagagggcttggaaattcagctgccggctgggatggttggctgaggtgatgccgaggcgacggcgttcctctgttgttttatctttgatcacattttgctggtctctcttattatgcagaaaaagaaaagaaaaagaaccttagtatgcaatcatgcattccgaagtgcctcacttttgatagatacgtcatttgtatgccactcaaatttctattagaaagttgcgcttttaattttaatatacccgtcatcctgacaatttctcagcggtcagtcagtcggttccttctttgaacgcggcaaacttatgaaaccatgatattcctggaatttgtggaatttatggactcagcagctcattttatattctacatcaccctctaatcccgaagccctctaatagactcaacagccttgagtgaaacggtatttgaagatgagctgttacatatcgggggacgaaactgatgaagagattgatttagaagaatctggagagatatgtcttctttaaagataccgatacaatactttcgaaaacggactaccaagaaaatggcctatcgatctaaaggggatattggagacagagattgcacttcgggagaattctcaacgcgagatagccttgaaagagaaaatgaaggaacttgctaaggaaagtatcaatgtgactgttgttcaagacttacgggaggaattgtctatactttcgaagaaatattggaccttggaacgacgttggtggaagattaagtcttcgattaatgacagcccgctgaccagaggtatcgattactggcgttcacagccgaaatggtacatgcatcgagtactttaggaagattgcgttgggagaagaggatgttgctgtagagactgtggatgctgttctaatcgccagttagaacagaaatttgcagttggtcattgcaccgtggagtgttcttgttgtgagaaatcccgggggtttgcactcgacccagagcaaaaatcccaaattcaagatttcttcaagtttgaaatcaacggcacaggtttctggtattacgatagaatcaaactcgcttctctgctagggttgatggtcggcaattacgaaaaccctttggatctcatcgttcgcttgccgccaagatatacacctccctctgaggaatcacgaaggagctttgtgtcgctgtcatcacttgttagcttacggtctatggatatttccgaatgaagcacaaagcaatggagaaagataatggagagagtggatcgaaaaatgtgtcatcattgctctacctagctagctttatagctacccaatccgattcgacacttcctggctgctgtaggtgctccaatactccacatagcgcttggtaaaacgatacaagtccgctcgattttaaaggaaaagaggacatggatcgaaggtttgatcgcatctaagcacaactatattgtgatcaaatctcaaggaaatgaaaattactagcgcggtaatctgatatgacgggtaacggagatcaggtggagttccgcgtggactcaaaaggttctgggctctggcgggggaaaatacagcgtattttaccaaacacggtcatatcccagtctagttagccgacatatatgattagtcagaacggctgtaactcagcaccctaccgcatctataatcttcatcgctcactcctagaatcatggactggaataaccacactgaacataccgatagccactacagtcccgatgcggcggatacggagttccgctgcggtctctgcaacaaggcatacagtcgccgtacgttgatctatgtgcatgggatcgatctgtcgtttgacgcatctgataggagatctccgagaccggcatcggcgtcggtgtgccaaaactttcggcaagcaacgcgcatctaagcgcaagtcttgtgaaacttgcgcccaaaagaagttgcgctgttcattgactcgtccagcctgtagtcgatgtgttcagatgggcaccgcttgtcactatcctaacaggtcctcggcgtctctaatccagagagatcaagatacaggcccggagaatgtgtcgtatctggaaccaactctaggaccgacatccacgggtttaacccccgatgtccctgtttcagccatgattttgcccgaggatgccagtaatagcgctcccattatcgatgacttcgcctggagcccaacactcaataatatcaattttaccgttgatgaaactggcttttatgatcaggccacatggcctgacccggcatcagacttcgtggatcatctatacagcccaacgtccttctttcttacaccgcaggaaaggttcaaggcacccaattctctattacttccgggagatctgataggcgtctccctaccacccctatcctccccggcgggtagtggctaccgagagccgtccgactccgacttctcctaggatattacaaatatatttgccagctccttcctcccagacttgtcccatctagcacttcgagacacatccagtctatctcaggagcttttcgggatcctgcgtgagtatccgcgaatgatgctacaacccaacttctggtctcccttcatccaccgccgtctctaccggtgcgctgagaacggcatggccgagcctctcggtattgccctggcctgtgtgtcggcctactcgaactccgtcgagtccagccttgagttcgttgacaacatgatcaactcggaacgggagcggctggtccggcaagtttcacctttacagcgatcgtccggaaacctgtctcgccgccctgcatgctgtttgcatgtatcagattttgggactctttcgggggccgtccatggacagccatagatcggggcatagcacgttcttcaaagatgggcgtgaagggcgtcgcgacgacttgggcaaggccgcagaacttcacggttcctttttactgaaggtgggtattttagcgtttctcctcgttaccctcaatctacaccgctcattcgccgatcgccgtacagatgactcggggactctgcaagctgtaccaaaatgctctcgtcaggaacgaagcaggctggcccgagtggaaatttgccgaatccctccgccgcaacgtattcttcgtccacatcattaatatactcgccgccgaagctcggaagctgcaccgtgactactttgagccgttgaatgatgccatgattctacagatgccccttccagcaccggagtacatgtggcgcgcctgcagcgatgaggaatggtcagtggcccgcgaatacgctcgcccgacatcacctactccgtgtacgctccaggagttgcttgacctgaaccttgcgggaagtttggacgttgcgtcactacaacctttaacaaggatgattttggcgtgtcatagaattcggtctaagtttaacgatgcggatgattaaatgagcatatgattactctattctttcatattctttcgttgtgctctctaatcccttgtctacttggctttctggtgtcatattggtgcaagatcacaaggtcccgcgggcttgacgtaaataggactaaactcagataggaaaagaagcggtttaggttctagcggtaattaaacattcagactacccgaaaaaggcacttataccgctgcgtaatatcctctacgcactctagatagctggctcgggggagggtggggcgacgttgttgatggaccctaagcttaatttaccatgggatctccccttttctgtaatttccatatgtggacttgcaaccatgtatcaatttattttacttaggcactcgcacaatgctactgattcggaaacggacgaggtaaaataccctactgcaatggttatggtgagaactttgaacgctaaatcgtgttcgccattagaatatccaacctctagcaatcaaaggagtccaccattcagtatgaccctcattgtggagtgtcccccattgactcgccctcgcaacctctctgtacaattccatatcgataagactatccttgatgatattcaagtcaagcaaataatcttgtctgccagttccgtgaagtgacagcgataataactggcggcgtggtggcacttacgaacccactccaagtcgttgaacgcttgcaatccactagttcgcaggccgatgcgcggttgattggtagtatcggcaataaccaaggggatcgctgatattatcacttcttccagggtgtatgttgttgatgatacgttcatttaaggcctagagtttcagtattacttatggtgggtcacggagaggtgttgatataggcaatgatgacctcttggggagtccccgtacctatcacgcccagagtaatgcttctcaacacaattgaaatccacgagtggcttttcaccatatgtggatcctataataataccactcgggtgtttgatatgatcgcccatagctagcgggggccgttatatcgaacgggtgattcggtgagctggaacggccacggcagattgaaatggtcgcgcgtggggcttttttgacctgaacaacttctcaatattgaattatccaatagtgtttctcgaggtcaggtcactacgccaaccgcaacttctgcaatgacgattacgtcaaagctatacagctgtcttgtttttctctgggtcttcaccacaacattcgaacgaatatccattccgcgatcgaaagtcacgtggtgattccccttatcagaagctcagcctcaacaaaatacaataatctcagtccaaaatcaaggccgctgattcccggccgattaagaaaaaaaaaacctgcgtacagacaaaccccgtcgaaccccgttcagatcccgttgttgtaaatcccaatcactttcgaagaatgcgtgctgaattgtgtgaattcttttaccataaagattgccaaggctgcctaattaggcttagtcctaaacttacctttataattctcttaattctacgcaacgttattggctgagccatatgttccgcctttttcgtcgggattctgccggtttcaagaaccaagaataagattacataatccaaaaaatgacatgcatgtcaacctaaaatgccaacctcggaataccctcactttagacagcctctagctctctccaacgatcctttgatttcaacggggtttgactgttatcctacaccttaccattcttccccattcccccattcccccgttcccccgttctccatccccccatttccccatttcccccttccccaccggcagtgtcaccggggagatgttagcccgcgtacggagacatcgatgatcacattttaggcccactggcccctcttttcggcctttggtctgcaataggaggtgtttggccttttgtataaaaaaaaaaggtgaaacatatgcaggatgtaaagataaactcataaactatgaggacgcacttgtaccatctcggaagttcggccgggatgaatatgtcaaagatcatcttctcggccttagcccgagagaggacgtcggtgccaagcccgatagatggagctattgcaggagactgaaaaaccagaagaataacgtctccaatacataaccaggtaatactagccatatgacttaaatatggggcaattgacataatttgcatgtacactgccaatcattcgccagtcaaaatgtgaagaaaccggcggtatagctgtctcggcaggcggtagctacgatcaaggggtttccaagtaattaacctacagaaccgtggaaggttggaagctccaacagcagatggaccaatcataaaaggacaatacaaagggtccatatgaaaagtggacttgggtgtgtagtacatgtattgaccccgcaagaaagtcaaaaaccaaggacacacattgtgtcaagtataagttacagcatataaagaccttggagattccctcggcttcctctttcttgcatctatttgtgataccctgtgctaccatgtccctctacactaccattaagactcccaatgtcacttatgaacagccccttggcctgtacgatttcccccctaatatcaatgatcagttcgctaattggttgctgcttctaggttcatcaacaacgagttcgtcaagggtgttgacggcaggactttcgagaccctaaaccccaccaccgaaaagcccatcacctccgtctacgaggcttccgagaaggatgttgacatcgctgtcaaggctgcccgtgaagccttcgagggtccctggaagaaggtgaccccttcggaccgtggtcgtatgctgaccaagctgtccgagcttttcgagcgtgatatggagaccctggcttccattgaggccctcgataacggcaaggccgtcactatggccaaggtcgatattgccaatgcggctggctgcctacgctactacggtggctgggccgacaagatcactggccagaccattgacactaattccgagactctttcctatacccgtcacgagcccgttggtgtctgtggtcagatcatcccctggaacttccctattcttatgtgggcctggaagattggtcccgctatcgctgccggtaacactgtgatcattaagaccgctgagcagacccctctttctggtctatacgcctctaagcttattgttgaggctggcttccccccaggtgttattaacgtcatctccggctttggtcgtgttgctggtgccgctatctcgagccacatggacattgataagatcgcctttactggttccacccttgtcggccgtatgatcctacaggccgccgcgaagtctaacctgaagaaggttactctagagctgggtggcaagtcccccaacatcgtcttcgaggatgccgatattgataacgccatctcatgggctaactttggtatcttcttcaaccacggccagtgctgctgcgccggttctcgcttgttggtccaggagagcattcacgataagtttgtggctcgcttcaaggagcgtgccgcccagaacaagctcggcaaccccttcgagggtgacaccttccagggccctcaggtttcgcagcttcagtttgaccgtatcatggagtacatcaaccacggcaagaaagagggtgccactgtcgcttttggtggtgagcgccacggtactgagggctacttcatccagcccactgtttttaccgacgtcactcccgatatgaagatcgcccaagaggaaatcttcggccctgttatcgccgtcaccaagtttaaggatgaggccgatgccatccgcattggcaacggcaccaactacggtatgtattattcacattcatcgtgaaattatgatttgtcgttctaactgtatctaggtctcgctgccgccgttcacaccaagaacatcaacactgccatccgcgtttctaacgctctcaaggctgggtatgtcatatctcattatttactgctgtaacagagctaactttactgcagtaccgtgtggatcaacaactacaacatgatctcttaccaggctcccttcggtggcttcaaggagtccggcattggccgtgagctcggttcatatgctcttgaaaattacacccaggtcaagactgtgcactaccgcctaggcgatgctctgttctaaaatgaccaagaatataagaaatttcatctgggtgattgaatgcaatgaagtgatgatacgtgattggaaattttcgttttgtatagagtccaaattgaagaacattggttcctcaaccgcttttccgatacctcgtaggacttctatatttgattatgcgctattaagatcctacatagtcccttttgatcgccagaactattacatacaattagtaaaatccaggtgtttcatagtatcgttatcaagctaagtgagcaagcacaccataccagcctaagcaacagcggtttattcctgggtcattctgtgtaagcctccttcctatcaccttcggcccttgctatcgtgttcgatgttcgaggtccttgttgaaatgactgagtgaactgggcatcgggccgaggatccacatgcggaacgaacagtcaaaactccatttcctgccagacagatagatagtcttaagcaatacacaacatgaaatgacagccaagatcattgttcccatactcagtaatctaaacatcaacaaatctaaacatcaacagtccttccgctggttccatgtatgtaagactcttcctcaccatctccagcccttggcatcacgtctgagatcatttgccagatcaggtaggtacctatcgtcattcaaggatatcagagccagagaaaaattcgcgaagttaattcgagtccattttgtgtccgtgtcaacacgctcggctcatttgaatccggagattttcctaaattccattggcttgagattgcaagagattttgtaggacatacaacttgagtgtggccttgttccagatgatctttgacggaaccaaaaatgcggctcatagccgaacttcggaagttccctggatcgagtcagccgtggatacgcgacgatattcaatgtgcttagtgacaaccctgtatgcctcttcaaaattccagcggattttctcccacgtcgcgtagggaagagcccagaactgctagatgtcaagggattcgccttccacctgttcccatacaaggtggatgatataaccacccgggacaatgtcatgttcgtcttgttagccaatgcgatatccaagcagccgaggagtgacagagcattctttctctgtgagaagtttcaaggcttccaattccacatgatcacctggtggaccggcctggggtttccgcacatctgaatcctcaagtcgggtaccatcaagaggaatctgtttgtagatgcgcatgaaggccgtctctttcccgtcgcgacaatgatactttccctcggtgaaagctggacccatgccaacggccgactcctctggtgtgatggggattggaagttcgcttaacttttcaatgacggtccattcccaaaggggataacgagtagcatccgggccgtcctcaaagccgatagtgatctttttaccagacatattgggaagaaaatggatttcagccatggtgagcgtgtacggggaatattatggaagctaataaatgtcaagaaattggatggagatgaagatgggaaaagggaagaggttggtttgatggaggtgaggataaagtcaacgggaaagttggtcccaggtacaaattctagaggattggcgtgacaacattacatcaccacctagctcaatatacaaacatcttgatgaaaacaagccaagctaaaagaaaagcattatgctccaactgcgccgatcgtgattccattcggcagttcaagtccgatgggaagtccacacagaaatttgtcggtataggttgtcccgcgctttgccgcgagtttctcttcgatatccctatacatgtcatagctagttgcttgtcagtatttcctaacgcctgaagtcgatcgaactcacgcattcatttcctctattgtaagaaccttcttcgcgtcttcgactttataggtgggaatatctttgttgacggagaaacctatgcgctagtcagaaaataatgcaccacaacacccgttgaatgaaatccactcaccaatccgctcgttgatattgtaagccgccttggccgctgctgcctgcactcttgtaacccgaggcagacgtacctcctggtaaacagcgagggcttgggtaatatccccagagaaataacgcttaccaaataagattccaagtgctgccgcatcttcaatagccatgcaggctccttggctttgatgaggcatcatcgggtgtgcagcatcccccaagagacaggtgctaccgcgttgaagatacgggtacgggtcatggacccagagacgccatggtttgatctctgtcccaatcttcagatggtcaaacacttgtcggtctaattctgggtatggggcgagaagttcctcaacagggcggtcttcggccccccatgcctgtgttgaatagtcgccttgctcacgtgggaagaagcagtagtacgacagaagctcaccaccgttacagggtgacagaacaatcttatcccattttccttcctgtccaccccagtactccagtgcgctatcttcggcgtagttcaccaggccgagcctgatggcatcctcggttttgacattggtgtgcaagcagctctgatcggaggctcgcttttctggcgtaattccaatgattcctcgaacggccgacccgattccatctgcccccacgattaggtcgtggcttacaacctcaccgttctcgaagacgaccgtactcgtcttcagatcgatatcgctgcactagatcccaggcaatattagcgcatgctcaattacagacagcttccattgataactatacccggtagttcactttgagagttgctggcgctccttcgccctcgcccagtgccgaatcctttagcatggcatgcatatattggcgatgaaacatgttgtagacatatccccagcgcttctcataatcgtcgaggtcgtacacactgacgggctcgcccgtattccagtcgcggttgataagcttcttcaaaaccaccgggtcacccttggcgatatccacgttccactcgtgtagccagcgggttccattggcagcacacgaaaccgaagcgccgacttcacctgcgaagtccgacttttcgtagatggtcacagtgtgtcctgcacgacgtaaggcaactgcaacggacattcccccgatgcccccgccaataacgccgacattgagactcctccagcctggcatggtgaatatagataaatcaataaaacggggtttgaggcgggttgaagtgaagcagaaagatgtgagtgtcaagtaaaatatatagcaaattgtctctcatattaatttcttatctctatatcttctcatatatacttcacaggtcccgaccctacgtcggctggcggatagtgcactcgggtcaccgcgggccgcgcactagcgcttatcttcggctcaattcaacagcgttatccgatcaaaagattcattcacaggaaggctgaaggtaaagtggaaattgaaagagggaaaaacatacaatagtaaggacaccctatacagcgcaactaagatcccaggggtgggaaatccatatcacatttaggtcgtcttacctacttgccaaagctttccattctcagccttgtcactttctcgataggatagatgatttgattctgaaattgtattcacatgctaactagcagagagtctttaattgatcaaaggcgaccggtatgtaatactagttatggctcaattgtacgaaggagttcggttgaaaattctattaattttgttctatcaccggcaagccaggtgatccctagctccgtctctgaatatcatggtacggctagaagtcatgtaatagatagtgataccatatggataccatggtaaattacacagccagaaatatccctcaagtggcgctatacccgaagtagcttttaggtaggtggaaattcggtatccaacgtcgtggagagtgagcaatgagatgatgcaagtgagagatttcagggctttagaaaccagcttttcccagcccgctgtcatgattcataaaaggaattcttgattgtaagtggagataggttgaggttgggttggaatctatggtttcaataaggtttgtgacaatgagctgttgcattcttcacatttcttgtctaatttatgcttctacagtccctcttcaggtcggaatgcctcttcggtccgaaatgaagagaagacccgagaggaatgaagggatcgggaaaccgagaatatcgggatcggatcccaggagaataggaggaatcttggcttcccataccattgatatcttgatgggaacagcatatttgtatgagaatgcgtgggggtcgaatgcagtactaaatcagggctgatattggatcctccatctttgaatctaacacctgaatacactgctagaagtcattgttcaactgaatagacccggcctaatttctgcagtcttctgaatgtggtcggttaaaactaatgataatcaaggcacatgatagccttcaaataagtgtttctataagggcgaaaagactaaccacaaccctaaccttgaaggaattcgcttcatcttactttctatgcatccctcgctttgaaataccagaaatatatcactcatgttgcactgacattcacccccacgccggggtgctccttacgtagtccttaaatgcgcttaaacacgaggataccccacgcggggagatgatcttttctaaatgcaacctcgtcccctgttgtttctccccacaaaaagcttctccccacaaatagccagtaaatgatgatatgatcggggtaagtccggggtctggctttaccccggtcttttgcaggttttctgcggggaaaggtattcgggtgtaccgtcatataacatgggtttgattggaatagcagttatagcccagcaagttttgggcattgcttcttatgccatactgctcccggaccactagatatcaacgccacatatctcacccctgtagaggattccacacaactcgcaactcgtccgacttccgagtctcactttccacgtgtgatttttttcttcttctccctccttataccccttgcctcctctggtatcttcttatcaactttggctcagactttatatgaattagctggtgtagtcttgctgcttatttatccttctctcgtcttcctcatacttcctccttctcatattggaaaagcaaacagaaatgtctcccagaaactcagacatcggggtgggagatattgacaagtctcgcgtcgacaatgtcgaaatagtcgccaatgccgacaggcccaacccacagaaagaagcccccgaatacgttgccaacctgacgcccgaagaacgcatgaaggccgagaaagctctcgttcgcaagattgacctgcgtctactacccatgataatcatcatgtacattctcaactacctcgatcgtaacaacatcgcctccgctcgactagcaggcctcgaggaagacctagggcttgtgggcaaccagttcgcgacctgtgtcagtatattgttcgtcgggtatctgttgatgcagatcccatccaacctgatgctgaacaaattcggcaagccagccctctacctccctgttgctatggttatatggggtatcatttccaccgctacagccgctgctcagagctacaccggtctcgtggtcattcgcttctttctaggtttcgtggaggctgcctacttcccaggctgcttgtacttcctgagtgtttggtacacccgcaaggagttgggcttccgcaccgcagcgctgttctctggatccttgctctcgggtgctttctcgggtctgatcgcagcaggtatcactaaaaacatggacaacgtgctcggactgcgcgcctggcgatggctattcatcatcgaaggtgccgtcactattgcgattgccttcatctcgatcttcgttctccctaactttccccgcacgaccagctggctttcggaggaagagaagcaactcgccgtgtggcgcctggaagaagacatcggcgaagacgactgggtcgacagcgaacagcagaccttcctgcatggagccaagctcgccttcgcagacatcaagacctggatcctgatgctcatgatcctctgtattgtctcctccgcctcagtcaccaacttcttcccaacggtcgtcaaaacactcgaatacggcaacatcgagactctactcctgacagcaccgccctactgcctggccgtcatctgcgcatttaccaacgcatggcacgcagaccgtagcggagagcggtacttccacgtcaccggaccgctatacatttccgtcgtggcattcatcattgctgccaccaccacagctaccgcaccccgctatgtggcaatgatgctcatggtgccgtctttctactccggttacgttgtcgctcttggctggatctcaaataccctgcctcgaccggctgcgaaacgtgccgctgctctggctgctattaactgtgtcagcaatggcagcagtatctatgccagctatatgtatcctgattctcaggctccgagattcggtccgtattcctctaccgctggctttgtttctagcagtcctaactaatcatcctatagtgcctgccatgtctgttgactgcgccacggctttcatcgccattatctctgcaacggtgctccggtttatgctcgtacgtctcaataagaagctcgatcgcggtgaggaggttgagggggctgtccctggtgaaggaagccgtcgtggtttccgctttttggtttaaatctggttatagtgttatttttatttctgatgcctatgtggctatagtatacgtgctacactgggatctgcaatagatatatattgagaatatcatttgacgaccgtgtaagaggtcatgattatatatgtactatgctccgcataacacgtagaactagatgctaagtggattccttccctttccaggctaattcgtcaaagctgggtggcaaaatccgggaagataccatttaacgcgctcaacaaattggtgaatcctaaagccaataggactaaagtcctagtgatcactatgcactgcgataccaaggtctaaccgggtgttttcctccatgcacgttacgggcttgcttcggaggtggaggacaagaatacataccttgtggtcatgcctgggagttgttataaaaataccatcttctcattacacaataaacgcgtgataaagatatacataataatatgctcacgaatcgaaaaaggccgagaatacaaagatgctgtaaaaacaagcaaatccacagcctcaagtcatcctggtctgtctatgcaattcggatagccgagtgtccggggagaccgtttcccgtttccccggatattccccattatccgaatacaccgggccgatgatgagtgccgggaagtcctgaaccgcgactgaaaacaccaaaacaaagctgtcggatatcatgtccgagaatcaaatcattttaaaaaccccaaactccaaatctatgcggtataggaagatgccaccaattccaaggtagcatttaagcattgttatccaataccccgaatgggttctcgccctttgtgttcgggctagaggaagactcctcggccctttgcttcttagcccccttcttcgcgggaaccttagcgaacccctgttcagactcggaccggctaaccggggccgaggcagcatttgccttggaagcagcagccgagcgggtgcggactggcgagtcgggggtggtaaccttgccggcgatcttctgggcctgagctttgatgacctcatcgtcagtggtagcttcgctgttctcgccctcgatggcagccttgcgaatttcacggctcagactcttcagagcatccatgccggccttctcagcggcctccatgtgcgtgggctgcttcactcctacatccttgcgattcaggtaggagcggacgaagaagcgcgcaaagaggtaggtgaggggaagaaggtaggaaacgttcaaccagatggcgaatgcctgtccggtggtgtccgcacaggtcatcatctgctgggagtagccggattgctggacaggcgcggcggtgaaagaagtgcccacgttctcggcaagtccttctgcgcccgcagcccggaatgccagcttcttcaaccaggagaccgcaccaacatcggtggtggcagaggcagcggcggaagcggcatcggtcaggtgttgtaaggcggcgctaccggacgggtaggggatagtgtagtggacaaataggtaggcggcggccatgttagttccgaagacgaactgggtgatttgcatggtggtcaagctgcgcttgatggcgttagggacgcgaatgcggagggccgtgagggtatagtaggtgtactgaagtaaaaaaaagggttagtaagtttgcttaacaaaagcaatgcgattgtccgacttaccatcatagcatgaatagccgagttaaccaagcagaagatccaaatgggagctgccatgtagcggataccagcccacatgcacatcatagctcccgcgtggtggtaggtctgtagggtggagctcttcttgcccttggccagaatgatcgcggtgtcgacaacctcgtagaacttggacagatagaagaaccagccgaagtaagccaagccctggttccatagacggccagcatccgtggggtctggcatgccgttggtgaggtggaaggcggggttgggaatcgaccactcgtcagtaatggggctgtatgtagcagcattgccgtaaccgcggggcccattgatcttgcatagtgaatccacaagtccgaccagtccgtaggggtcgtcggtatccgggaaagagctcctgaatgccaggaacatgcctacgaaggtccatgcggaatacacagctaggaagacattgtgaagaacgacgaagagcttgaacaaacgagtgttgctgaacgcgtatggcttatatccgcgacttttgttgatacggttgagcaggaccacagtgatcgcatagacactggcgattgtgattggtagtcggacgtccagcacctggttatagagatcgttcgggatgttgaagggctgcttccatgtcggggtgtcaacgtgaggtgcggggacggtcactggaagctcatggggagggaaggcgaggagagaggcgggagggaaggcaatgcgaacaatcgcctggccaaactcggtgggcacatggaagtcgtgcatgattatcgccaacgcggaagcgttcaattcaacgcgtcaactagggagaaagaatataggagaaaagatatgattctaaagaagaaaaagaaagaaaagagaaaacggttgaagtgttggaagcccagtggatcctccagataaactgcccttgaaatttctcaacaagggcaatggccgacgatctcgatccgcccgcgtttagtttgttgggaattccaaggcttggctccaaacgtgccgaggttggtaatcgccacttgcctagaagagtaacacctgtgacctgtcgtactccatttatgtacgtgcacccgtggacatacggaatatgcaatagtggacttttctcaattgtatacttcgtgcagagtaactatggtgtatatatggccagaattgagcttccgttggggcattgacctataaattgcactgccaacaactaggatgattggataattctccgatgtctttagaagatcagaccgggaagtccggacatgtcgggactccggcccggtgatctgatgccatccgcatgcctccaaagcctgtactttgcagatgccccctacctcaatagggctgggtggggaaaagccgctgagtcagctggacaaagttccgagttccccggaacattctcaaccaaggtttggccggcaaaggttaaattgacaaaaaggcttggagggccggaactgtcaaggaaggaaccctggaaggtgacctcggattatccaatcgggatcagctgcttgttgggatactccagggttgaaccactggaatcggcccaaaaatgttggggatctgaaatcaggtatataacaaccctaatccgatcacatgcagcctcggtcttactggatgttgaatatgaatgacccaagcacgaagatatgagactcaccaggatagacagggactatgatgtacaactattgtacaccgtacaggacaaatatatcgtcatcatgacaaattgttcgatttccatcctaaaaaaaaaacacccatcgacgccaggaatgcacaacgtaacaaatacagggttaaaagtacagtctttagcggggcttggtgtcatggggaataggaggaggccccccgagtggtgttggtgacgaaccgtcaacaggagacgcacgaaattcagcccgcttaggtggaggcggtggaggagccttcttgcgttgagcgggttctgtggatgagaccgctgaagaattagagtgggccatggggatgggacgagcaggtgggcgtggaatccgtttgttggcttcggcggagaatttacgatcctccacaaatgtgttgaaacgtgatgtgactccaccccatttctctttacccaactcgatcttgtcggcatggcgttcacggaaatcttgcacggaggatgtgccccgtgcgggctccgccggttccaggttcatactagaagtattcgacgcgggccgggccggtgggctaggcgctgctggggaagagccagtgagccgtgacgcgtaaccactcaacttctgctttcctgaatcgatggtatctgcgtgacgctcacggaaatcgccgtatttctgctttcccgaatcgatggtatctgcgtggcgctcgcggaagttatggagagaagatgtgctacttgcagggtgcgactgagcaggcggggtgggcgccgatggagatctcgtgttcatctgggaaaagcgtgactgcagctcattgacaggtgtatgtgcaggcgacggagatttctcctggccgattccaaatccaggaaccgagacgcccgcgtttgctaggcgggacgtagcatcttgattgatataatcgtgggagagtaccgggccaggggaataagcggggagcgattcggagctggaggatgcattgcgggcgggaagtcgtggcgggggctttggtggcctttgctttgagattgagctcgaggcggaacttgcagagtccagtcgccgcactggtggtggggggagattgtctgtagaaaggccacttgtgtcggcgcgatacgggattggtgggggcggcctttggtactgttcctcctctacttcggctacttctcggcgatggggatcctgggcggttgtctgatttggcgcagcggcggctccatggtaattgatatgtttcggagggggcccaaataaagatgggtcttttagggccgacaagggttgtgagacatgctcggagcggtttgagctggtttcattgccctttcccataaacgatgcctaaaagcaagcaatggttaataccaatgggccgcgtcgtgaatacacgaagggttagcttaccacgtggcccctgatacccccctgtgacgaggagccgtgtccggagctggaggagtcaccttcctttccctttcccatccaaccggcctagtagcaaatacaagtcagcatcaatggccgaggtgcgagtgagcccgagaagggtgaggggtgaggggtgagcttaccactgagcctctgatacccccttgtggctcaggggtacgtccagagccagagccagagccagaggattcaccttccttgccctttcccatccacccagcctaatagcaagttcaagttatcatcaatggccgctagagttacaagtcccagagggacaacgaggggtgagcttaccacttggttaatgcctttgaaatcacctcgccaactctccttcccaccttccttgccttctgggtgccagccacccttgatagtattgcgtaaaccactcattctgctgcagacggaagtgcggggatgacaagttgctagttaagtggtaagggaagctgtgacggcaatatccccacttaatcacgtgcgagcttgatatagtaattgatctacagtgtacatgtgcgtagactagttataggacataagtgaataatttatgatcgcaaattctaagacaattcaactgaattcctaatgttccttcacgtgcttcaaaatatttgattgccaacagagtaagcggtctgaccagattctgcgatcacttccagaataagtaggcggtacatctctgccccaaacaggggttataatgaactttaagcatgtcttttcgcctgcatatggtcaaatgaaaatatgcagagaagattagcatggcccctgtactaaggatgacacgctcaatcaaagagaagctacctaatttaattttttttcatttacctgtccttcgttatggagataggatgcgggtctgcggacttacaaagtccatggatctgattggtcctactgcatttggaaatcatgtgatactacaaagacctcgagacgcgcgtctggcggttccagttatttgtgggaggcggtcaatagcagaatatatgttctgccggatagttgagggcggtgggatgataataggaagaaatgcgttagtgacctcttcggcgctgaagaattggcttgataggaaaaaataatctattaagtatatctaggtatggatttgcatagttgaatgactagccgggtcaggattgcttaacaaaattcttcagtcaagactttcttggagatatcgtcgactgagatcgttctcaatccattgctcaattagcccaacggtatctccaacgaggtgatcgtagtttgcaccacgtggaataaacatagactgatgtgccatgacttcgtccatgtcttccattaatatcggcacccaatgggagttatcgttgtacttccaatgatgtgacggtaagagtatgaacttgcggaggtgttgtttattagggtctgtggactccgttgttgtgatagagccattttcagttgagagagaaatgctttctgagagagactggctctctatctggtcggttgaggttgaggcagacgctgcggtacttgtgtgatccgccagcggagtactgttgttatcgtcggccttctcgatcgccagggaagaatgagaagtggtggacttcaagtgcttggtgtcgattgccatgttgctcatggcggtagttacatcggtttgttcggagccacttggcgtatctgagtgttcgtgcgaatgtattttcgttgcagattcatccatggcaatttcaccctcccttgcggactccttgtcttcctttttagactttttggctttcttttcggcttttggcttgggtggtcgtggcttgcgcccagtgctcgcggtatagtaattgacaaatcgtactctccaaggactggactcagcttctagctccatcaagtgcccgtatcgccgacgaagttcagagtaattattgacacaaccagcgaatttgaagggtgatacgactcgatcaaagatagatcgtgagagatgatcggtgtttttgttgacaaaatgcaaaacaccactgagaaagccacggtcgaccagacgcacatcattcttgaatggtgggtcaaagttggggctgaaatgggcggatttgaaggccggttccaagcccagagactcttgttctcgcgcaagcttctcttcatctgccgcatctttctggggtattaagctcatggttcctgttgctattacacgaggatggatccccaaaaagggaacatcaaatcctactaagcctaaaattcgatgctttgggtgcccatcttgctgtaagaggacaacgtctgcagctaggattccaccgagactatgtcccagcaagatgacatcaaggtcatctgcctcatgtggcgatagcctacaagtgcctccattagctgtgtacccagttaagaatcaagtaagaacgggctttctgtgtcggcacataccaggcactaaactgatccacggctgtttgtatctcgccttgagatttgtatctcggatacatgcgggtaaacaccacgtgtgactcatccaacgaggctgttaacaaatcatgaacatgtagcggcaggtcatgaaagctcgcttctgatcccatgaagccatggatataaatcagtaatagtctgcgcttttctgtggcctgatatcctccggggtgagggagcgacaggctggaatgagacccatcggagccagtacgaatattccccttcatctccatcgccaaagagagaagctgagataggaaaaagaacaacagaattcccttcttggatatccccaacgttccaaatgcggggacttcttggaacctgaagttgccactgctgactaagccaagcggttggcccggagctccaggagatcatatccacattgaatacttcgtatttagagagggagaagatagtgtttgaaggtgtgaaggtctttacagtattctagtaatctttgcacataatttttatactgctctgtgtccaatctctgctatcttccgcgacttccgcgactggcagaagaactatacaatcactcattacatcgtaatagttatctcatacctgtgttgttgagcaacagaaaggatgtggatcaagacattatagtttcatgcgtcctatgataatatctcatttaggctagtagaattcgcagatttcgaattatcacctcattgatctaattttagtattgtggtcccaaccctgatatctacgaattatatacggagtacggagcagatctagatgatttcctttccctgccagaagggtataaataggatggacattgggattgtgatagtacatattatattcaatacaacaataattccctgacactgatctcgattttctgatcgatcctgctctcactctcccctcacttcgaagtcacttctctctctttttttttcttctcgattttatcctgtagcctccttcgtttcagtaaaggtgtcacgatccacatggatcgctattacatgcttcatgtttgcttgctcgcttacggagtactgtttgcctatttgcttgattgctccaccagatcattctagcacctagctggaaagatagaatatatcaagcattttttcgtctgatattcttgttctgttggcatatggctgccaagctggttcgtgcctgggctcttaggtaaagtactttacgaaaagcctctcgagatgactatttcaagtatctatattcatgattactgattgacaatacctttgttacgatcgtaacgtttgcttgtttgtttctttacttgtttgcattgtttacaaagtggtcagctatctcccacattgcaacttgcttcttctttctcagttattctgaattaaatgcactcttctttgcaagacctggcttgtcacacccccttccccccgcctgaccgcccgacccccctcatccagccctggagcgctcggaggggattgatgaagcagagacacgcctcgcacgtgtcctgtaggcttatctccgcgtcggggggctatcaaactgtcaagtacagccagaccggtgaagtccgtcacagtagatcatctagcaggttgcaagtgcgaggggtgtcgagacgacagatttgcccgagcggattcaacagagcgagggggtaaatgagtgcgaataattcgaagccggatagttgagttatagcccacgcatttgtatcattttatgtacattatggcactgaaagcagaaatggaggctgtactctcatcttactccttgttaagatggacacttactattggctcattgaactactgtcagcattggcgtcaaagcataatgatccaataataaagtgccccataaaacgttagacaacttacgaactccctagttagggttgatcctacgtggccccatattagcgcaaactgtcgtaaaaatagactgagcatctctaagcctcatggaaaatgaggtttcgatgatttgtacatctcgataattatttaaattattatgtgacgtttaatttgaggacatgttggttcaaagggatcagagtaatatgagatttcattgacaagtctaatgcatgtcgaagcgcttctttgttagagtctctcccgagggcagtgcttccacccccacctggtctgctgtgcatgatctatgaatatcacttctactcttcctaagacttttttggcatctcgcatttcttgctaccttccgacttctttcgaatctgggcatattatattattctatacaaagatatccgggaggtaggtaaaacggtacctaaaacggttattgaatgggagaattctagcgccagtgtcttttgtactatcttttgtggtagttctttgtcttcgctttggggccttcacataagacaaaagtgccccgaagaatccaacctcaacccaccatacctgctatggcaagattcttgagattcttgccatttgcaatgttgggcactggactggacgatgcagatacctcggattcctatagatcggaatatgccccctcatcggtggcatcagcgggccaggatgttgtattcacgacagcacccggctcaaaaaacaagaattttgcagacgcgtcaagctgggcagatccagcagtgacaggtatctttcctggaacagtttcatggccctcagtcaccgagttgaccacatacccagcatcaagtgagacatcgactgtcaatgatatcagttcagaagccagtccgaccagcgtactggatgcaacatcatatacttcatcaccatcaccatcaacatcgaccacaccgtcaagtacattcccatcctctctcacatccaccacaacaacaaccacaatctcagcctcagccacagccacagcctcagaaacaaccgcagtaaacagcgactcaaccactttttccggtggcccatcaaaaacaacgaaaatcgccatagcagtcccagtctcagtaatcggcctagctctaatcctagcgctgctattcttcctctcccggcgacggcgccgggaaaaggaacgcaacgccttgccaccaccctacgacatagcagcaggccatcgaagtgcagtatccacacaagagctaatgatatcaccgaaatcctcgacaccagaagcaagacgttcactctcgaacccagctatgtcctcagcggccacgtcaatgcctctgcctcttccccggatcccgattatcagcatttcgccctcgacggaaagtcggggccggacgcccagtctcggtcccagtcctgactcaagctccgtgcgccgcatgccgacggcccatggacctggtgattctgaggcggagcttggggttgcggtggctgtttcgatggcgcagaggcgaagtgctacggagcaggaccttagagctcgggttgcgcctgttgtatcgtcgagggggccgtcgcggttggctaggatgccgtttgaggacttttcggatgatgaggttggtattggcattggtattggcggttcggatgatgatgacgatggagctgtttctgatgtgtcggatttggatgggcggaggagggagagggactttgatgaagtttctgtggtctcgtcttttgatgaggtgtcgccgataggtgagcaggagaggcggtttcggggaacttgaaggtgccggtaagatgatatgatataacgaagctaagcttggtctagagcttcttttacgtgggtctcttttggtccttggagtttgtgagtccgaagttttcattgtaaggtacaagttgtgtatttcagactacgtatttgaataggactggaatggtatcctaaccatcctaaccatcgtagttgtcatggtattgggcatttcgaggccatgtgcagtgtggaaatgaactgttggtgtctattcttattccgattatcttgcaccaccgaattcagccttgtgggctgtggcctttccgtgcgtcaattcccgaagagccatggtggcgtactggcttgatcccaactggaatttcaacacaacggccaacttatcagctgcagtctcatcggccatagcggtatcggtattctcatttgcaggttgcagattttgcaaatccgtcttgacaaactgctcatcgtccttggaataaagtttaatatcgaaagagtagttggctcccaacatgcggctgaaaatcttgcggtagccgccgctaaggctgatatccttccacttgcggcgcatattggacggatcaaggccaccaccctgctcgctttccatgaagcgacggtagaattccttcatttcgttttcggggtagataatgtcatatccaggctggggaagcaccaggtcaaagatggtatatttgccactggctgcctcttcggccgacagggcacgggctcgcatgaacatgtcctcggccgcaacggcactgttctcgccctgaggaacaacgataatttcaccgtcagcatcgacagtctcggcagcctcgacagcagaggcagactctttgtcgcggtgctcttggataatgaccagatcgccttccaccacccggtccccgtaaaggcgccatcgctcacttgcagcgaagttccagacaagcgactggtatgcgtgtacatacatcaatcgcaaggtccgggggatactctgcaacgcacccaaataatccttgctgctccttccgaggtggcggatgagactgttttcagcggagaacttgcgcggcatctttagcagagcgtcggcgacgctaccgccggtctggaagatattaatggccatggcacgatctttgtcatcattgctgatgttagcagtagacatatttccctccattgccgcctgaagagatgcaggggcatactgcagaatagcatcgcatgcgcccttgaaatctccctggagcattttgacaccgactgtatccgttcgggttgcgaaggttccaaatcgctggagaccgtagtagttgaagtatcctcgctggtagagattcttcaaagaagtaccgacgacctcggatgccttggcgatcgcagcctgaggatcgctcatgctcacgccgggaatttcaacgtcgcgcagagtaatcacgaactcatttccctgcaaatctccaaggtccaggccatgcttgcggtactgaaagtctccaatacgagcattgcgaagttccgagttcacttctacaagccgggcgaggcgaacgcgcacagcacaggcacgctgcacggtcacaccccgcctatccttggttccagcaaattggagagccttagcattcatcctcaatgagcgagcgatgtaattgatgacttccattgtgtccttgttctccttgtagatcgtgaaatgcagatatggcccgccgagttcttcccagtttgtccgctggccctggacccgggcgttggcgcgtcctgcggtcgcaccgcgttggaaacggttatttgccgcagtgattgacatatttccatctgcatcggtagtagattctagctgggaattgaaaatgcgacggatggcctggtggatcttggtgcgaaggtcccggtcagacacggcaaaggtgacactgccgaattcactaggtcgaccttttggcttagccatggcgaatttatggagcgcaattatttcggcagcattttgagcgccaaagtattcctccagaagagtgtggtcctcctccgagactttgatctgagctggtgtttccgcttccttggctggggtttgttctgcagcctgggcttgcacctctgggactgtcgacgcaggcgtacgctctgtaacagtatttacagagttgtcgggctcggtgatcgtatggatgcttcgaaggtggacaacttcgccggtggtcatgatctcattgaccataaaatctgtgtatctgcgcatgattattagcgcaattctcaagtggagtaaataatagctcacctcttcttcaggatacccgagaatccctcagtgttgctcacaaactccgtgataccgacctcgacttccttcagagcctgcgcatctgagactgcggtgcttggagtgtcagttgcgccattgacagcgatggcgacctcagttgaccctacatcctcagtcttctgtcgcttgcgcggggattccacaatatctggcttctccatattgtgttaatcgttcgtaatgagtggggttagatggagaaggttgagcttcaggaactttttctttaccgatttggattagcgtggaagggccaagtgtgggtcagccctacttaccgcattgggatgggaacttcatacttcacttctacatttacctcattgaacgtttgactctttcaataatcatagattcattcagagctgcctcaccatgtaatttctactagctctatactgtattcgatcataaccatagttgtcataatacagactaagatactcccgataccttcaatgcctcaaatggaattaatgtgttacaacagtggtgtaacaatttatcatcaatacacagaaaggactttaagtgccaaatctagaagcttttgaaggctagagcccattgtcgcgagctattataaaatgatcgcacatggacactcccgatgcaactactatccccaactagaccattgcgacgacaatcattacgcacaggtatattgcctcaatttcagtctgagaccatcgttatgaggtttatagtggatgagaaatttggtaagctacccacaatgatgattcgagtctgtgaaaacgttataatagaggctaattgtttcatagactccggtatgtgatcgtaggtataatgtgagagttaattcgatattctatagattctcaataatggtcatgcgtaagccaaaatgctgcataagcttacatcagatcgaatcgaggtttttcaaagtagccagacgaatttgaaagcatatatgatttcttatggaggtctaggcggtctatacttagaaagtcgaatagataccagagcgcaagacagaagtaaacatgccccagttaaagagccgaagcgtatattgtattcgaaggtatgttgcgactcctaatactctactcgcttcactcaaatataagacatccaatcccaatcacaaagaagccggtaaaggcaatacgcgccagaaccaggaaagcacgaattctaaataagacgcccggacagctgcgcatgcaacaaaccgaagaaatcactcaatctccgaccacagctgagaaggttggctgatcggacttgtgctctggaaggaaaccgaaccagaacatcgaggtataaaatgaaggtattcgcccgctgttctcgatatcaattctacaagaatcaaccttctatccaaaatcattcagtgagcctcattactatctcgcgttcataacaaaccgcaattgagcggatcattgactgtcatcgcatattagctcaatctaaaacaatgaagtctaacttccttatcgcgctcttcagcttggctctagccgctgttgctgcccctaccggtatgtcatcagctatgcggcgttgtgtttagtcgatcacttctgattgagtggccatgataggtcctggcggtagcggacttggcggcggcggtggttccggcggctctgtgggcggaggtggcggtggcggcggttcaatcggtggaggcctcggtggtggctttggaggtggcttcggcgctggttctggagccggtggtggtcttggtgccggtgccggagatgggatctaaaaaccttttgaggctggactaatgcgcttggcattgtgtagtcttgaggtggtctcctaataggatgataggactggcaataacagcttcagccctacttgatttgcatgtctgaatgtgtagtggtctctagagtacagttggctgtgaagtagaagtctgtatggtaaaagaaaacagaggaccaaacataataaaactgctaacgctcagcccaaactccattgtggttctttttctatcttccaggatgtggtgtgtgcatgatacatgggttgcgttagaataaaatgctctgtacgagacaagtgtgaaaaaaagggggaacaaatgttcaatgcataacaaaaacggacaagggaatggttattttacagctcatctttgggatcctccttagtcttgggctgatccttgcccttgcccttgctcttctcggcatcgggcttcttcttttctttagatcccttcttaccactgctgctgctcttcttcggctgaccggcgtttgcagtcattctttcgtacatgcggttaaggatgcgctcaaactcgcgcagccgcgagtcaacctccaaaacggtcaaagctgggtcatcagactcggaaagttcctcttgcagactgagctgggtttcgagccagggctgggtggactcgtaggcctgggtgatggccgtgaggtcagcgggagtgaagagggagtacttggggcctgtgggtttggccgtagcggcactcttagtagatgtggtagaagaagaaccggagtatgggtcttcatcgagatcatcgagatcaccgagagggtcatcagaagcggctggggctgggggcgatgagctggtctcggtggaggtggaggaggcgcttgaggctgagagggaagaggagtagagctgctcgtcgttgtcgatctggttcttgatcaattccttcatggactcggcattcttgagcatgtccttgagcaactgcacgcgggctgggcgagaagagctctccttcatccgcttcagtgcagggttgacgatggccttaaggtccttgagcctcgactggaaatctgcagtcttggcgttgtcgctctcatcggacagccagtcgctggccttggagactctctcggagagtacaactagttgatctggcttgactgcattgatgaactcctcgttctcggcgagatctcggctgcggtagatgaaagattccagttcattaagagcctcttcgcgcaggatgcgatcacggtccgaatcatcgaaggcaaggaggcggcccttgatgcgactgagctctgcggctgatggagccggagtgccaagcgtcacagacttcaagctgatcgggataacttcaatgtttacctgaggggtagcctttgcgtctttctttgcgtccttggtggatgtggtggtggtcttggaactggcggaggatgcaggggatgattccgtctcgggctcaagggtgatcgattcacgcggctctccatcttcgccgaggggctcctgctcatccttctttccaaggccgaagaagcccttgacgtcttcgacaattcccttcttctcagattccacctcgcagctaacggtaccagccataacttcgggaagaccgtccacagggctgagacggatcgtaaacttcgtggtaatgtttgcggtggtgcagccaaagttatccttgagcctggcaaccgacgcagtaaggttctgtgtctggacactgaggatgggctgttcttcatcctgggaaacatgctgagcgaagctgaattcgaaatcctccaggttcttcacggtgacttgcttctcaggaccgacctgggaagtggctgtaaacagcttctggtttctttgcttgccatctgagttccacttcaaggagatggggtacgtagcggcgtcaccggtgcgaatgtccttaacacggaaattggggctcaaagctgctcccttgaaggcggcaccaaagacagccgcttcatccgcgttgacgttagttctgattttcttagaagagccagcgaggctttccaattgcttctggacgaacggagtccgaatggctccaccgtgcaacacgacagattcgatatcactcaagtcaaggccggccgctgccaaagccttctccactggggttccaatgcgggcaacatactcagcagccatcttctcaaagttggcacgggtcagcttgtacttgaagttgatgttctcgtcgtacagtccctcgaagcttgtcgaagtctcagtgttggcgctcagaacctgtcgaagcttctcagaatccttccagagtctggacatagtctttccatgcgccttaatttcagctggtgtaaccttatccttgagtttcgtatcctcaaccaagtgggcgaccatgtcgttcacaataaggtcgttcagggagtcgcctccaagtgacttgtcccaaccagctccaacaacatgaacttcctggatagtcttgttgaatttgccaacatccttaaccttacggctctggaaccgcaaaacactggcagtcgtagacccagcacccatgtcatacacgatgtggtattcgggcttctcgccatcagaaacgctggggaaagtacggctggtggcgtagttcaaaccgacagccaatccatcactgataagagcctggattttgaaacctgccagctcagccgccaactcgaggctgcgcttctcctccgcggtgtagaacacagggtaggtaatgactacatcccgaacatcagatccctttccggccaacgtatcagcattggccttgatctgcttcaactgcattgccagaatctcctcgaccaagaaggcgtctttcttctgtgcctctcctagccggttgctgcggagagcaacagaaccgcgaccatcgggggcggcctccaatttcaacgcggggaacctgctcctataattcttgactgcctcctcatcgccatcgttgaatggaacgcccaacagagtcttcaggttgatataaatgtcgtccgggtaccgagctgccaaggcgagcgcatcaccaccatagaaccgttcggggaaaggtgcatcgctctctcttgtaggcttgaaagcaacagcagcggactccttgcgcttcgaatctttagtgaggacaatctcaagcggaatgccgggtttcacaagagtagccttgaaatattccgtgccgatgtcgatgcccaggacggccgatccggcggcagaagctgacccagcgaagctaaggaggaatacgagaaatggaaggaccacgagggatagcattggcgagctggataattgtcggcgatttaagaacgccattatctatgtgtaggctccgggctgccggagtcagccaaatcgtcgattgaaggggtttcttgcggttttaacagggaaaacatacccttttccgaacgtatatagacaaattgacagatattcaatcactctgcctgtttgccgaatcgtgtgtcgcggtttgggctagctttgcgccagatggatgatcggagggagctatgggatagctcagagattggtgttgggttggcgggtgggtggtgggggcggtgcttagaaaaggaaaaccaggatgactcgaaattaggccatctgagaccaaagggatactgtggccacttggcagtaacgtaacttgaagcctaaaagagctattggatgaggacacgggtcattatgcaaacacatcgggcgacgtttgatgtttgcactgcttatcgttatcgcattatgtcatagccctaattccaaatagggctgaattgtagaccagacaacttgtggatgttaatttataaccatgatgaaatgtgggtgtacaattaatgcaaataaacttcaatttgcaaactaatatatataactataattagggtcccataatcgtggataaggagcgtcaggtcgtcaggagacccattaataaccgccatcctggcgtctttcaagtgaatatgtcagaaacaaatttcttggatgttttcgttgtctttttttcttgcgtgggattatcgtccgatttctcgctagcccctgcccaaagcgatggcatcatatctcatctgacagatcaacttccgtgtagatcaattagagcagagcaaacaggagagccaggccaggaatcatggccacagcagacttctggagagctggagcactattgaacacaggcgaggaggaagcagggggagccgaggtggaagaagtgatggaactcgactgtgccggggcagtagacccagtagctgaaacaccggttggggtagctggaacactggactcggtagccggaatactggtctcggtggccgggacagaggtctcagtagccgggacagtagtctcagtagctggaacactagactcggtagccgggacagaggtcgcagtagccgggacagtagtctcagtagctggaacactagactcggtagccgggacagaggtcgcagtagccgggacagtagtctcagtagctggaacactagactcggtagccgggacagaggtcgcagtagccgggacagtagtctcagtagctggaacactagactcggtagccgggacagaggtcgcagtagccgggacagtagtctcagtagctggaacactagactcggtagccgggacagaggtcgcagtagccgggacagtagtctcagtagctggaacactagactcggtagccgggacagaggtcgcagtagccgggacagtagtctcagtagctggaacactagactcggtagccgggacagaggtcgcagtagccgggacagtagtctcagtagctggaacactagactcggtagccgggacagaggtcgcagtagccgggacagtagtctcagtagctggaacactagactcggtagccgggacagaggtcgcagtagccgggacagtagtctcagtagctggaacactagactcggtagccgggacagaggtcgcagtagccgggacagtagtctcagtagctggaacactagactcggtagccgggacagaggtcgcagtagccgggacagtagtctcagtagctggaacactagactcggtagccgggacagaggtcgcagtagccgggacagtagtctcagtagctggaacactagactcggtagccgggacagaggtcgcagtagccgggacagtagtctcagtagctggaacactagactcggtagccgggacagaggtcgcagtagccgggacagtagtctcagtagctggaacactagactcggtagccgggacagaggtcgcagtagccgggacagttgatttcattagcaattgaaatttgtagaatagtcggagcttcattcacctgggcaagtggtagtcgtgtaggtagtagtcacgataaccggggtaccaggggtctcggtctcagagggagcggtcacagagggagtggtcgaaacaggaagaggtgtggtgggaggagtggttgaagcgggagcggttgtaggctgagtgcaacccttagtacaggtgacaacagacgtcagggtgatcgtgttagtcgcagtcacggggtgggtgtatgttgatgtgccacttgtgatagtactccatgtcactgatttcattagcaattgtaggatatcatggaacactagactcggtagccgggacagaggtctcagtagccgggacagtagtctcagtagctggaacactagactcggtagccgggacagaggtctcagtagccgggacagtagtctcagtagctggaacactagactcggtagccgggacagaggtctcagtagccgggacagtagtctcagtagctggaacactagactcggtagccgggacagaggtctcagtagccgggacagtagtctcagtagctggaacactagactcggtagccgggacagtagtcgcagtagccggaacactgctctcggtagccggaggaatcaccacgataggagttgtagaagcatcagtgcaagtggaaacagacgtcacggtgatcgtgttagtcgcagtcacggggtgggtgtatgttgatgtgccacttgtgatagtactccatgtcactgatttcattagcaattgtaggatatcannnnnnnngcaggcgtcacggtaatcgtgctcgtctgagtcacaggatgggtgtatgtcgacgtgccgcttgtgatagtactccatgtcactggttttattagcaattagaattgatagaataatcggaatgtcatttacctgggcaggtagtggtcgtgtaggtagtagtcacaataaccggagggggagtgccagtctcggtcacagagggagcagtctcagagggagcagttgtgggctgagtgcaacccttagtacaggtgacaacagacgtgacggtgatcgtgttagtcgctgtcacaggatggctgtacgttgacgtgccgcttgtaacggtactccaggtcactgattttattagcaattggaattgatagaacagtgggaacttcatttacctggacaggtggttgttgtgtaggtagtggtcacaataaccggagggggagtagtctcagagggagttgtaggagcgggagtagttgtaggctgagcgcaaccccctttagtgcaggtataaacagatgtcacagtgatcgtgctagtcgcagtcacgggatggctgtacgttgacgtgccgcttgtaacggtactccatgaatttattagcaattgtaggatatcacagtcggaatcttatttacctgggcaagtggtagtcgtgtaggtagtagtcacgataaccggaggaccaggggtttcggtctcagagggagcagtctcagagggaatgctagaagcaggagcggttgtaggctgagtgcaacccttggtacaggtgatagcagacgtcacggtaatcgtgctcgtctgagtcacaggatgggtgtatgtcgacgtgccgcttgtgatagtactccatgtcactggttttattagcaattagaattgatagaataatcggaatgtcatttacctgggcaggtagtggtcgtgtaggtagtagtcacaataaccggagggggagtgccagtctcggtcacagagggagcagtctcagagggagcagttgtgggctgagtgcaacccttagtacaggtgacaacagacgtgacggtgatcgtgttagtcgctgtcacaggatggctgtacgttgacgtgccgcttgtaacggtactccaggtcactgattttattagcaattggaattgatagaacagtgggaacttcatttacctggacaggtggttgttgtgtaggtagtggtcacgacaactggaggaggagtaccagtctgataagaagtcgaggtaggagtcacggctggagtagtaggaaccaccactggaatagtagtcggaaccactggggaagtaggaatcacgactgaagtagttgtcggaatgactggggaactagtgggcgtctcggtctcggacgaggtagtctcggacgaggtggtctccacgggcggaggagtctcgacaggcgcaggagtagtggtctctactggaggaacactgctactgtgaccaccctgacctccgtggttaccccaccaagggccaccgccatggttaccactgccgccgcggacggcaatgcgaggctcaccaacatgtttgggagtaatgactacgccggacgccaaggtcgcggcgtagagcagaacgatcggaacgcctctcatcttgactggcaaacgaatgcttatgtgctgagatagatagggctgatatgctccttggaacgaaggacgacaggaaccgtagcgagagagttcctaaacaagcaatataaacaattgaaataattgaggacgaaggctgggagagattgagaacatggcaggcttatatgtagctcgggggtttggtttcctcggggccttaattcctgtccggttggctcactcgatagcttctgttcggttggccatgggctagtgtggaccacctggtaccccattgtattgggtgctcaaaacaggaagtcgaaaaaataaaagtggcgctcatattcgaaagccaaccagaacgggcatgaacaaccagtattcagcagtcgacccgcatattttccatatttccaacgaagaagatgtatgtaccggaacaggcccggttgactagacgaccaggtacaagggttaagccaatgagaacctgtcggggtctcagcgattggcgtgtagtttgccaaactcgaaaaagttgaaatatgacaaagtcaaagtgttcagagcccgatgagcggatcagccaatggactcggatgatgtaggttgtgtcttggcaatgcgggagatagctctgggatgtcccatcacggcatagagtacgtacctatatttggttagggtttgccagtttctgctgttcttgtcttttttttttgtctaatttccttgtcttgatacttcatgatatcaagtctagtagtagaatgtcttttatacacatcatgaaaccgagctatgaataactcttaagtttggcccaccccatatggcccagataaaagtgtggggaagcgaaacctcacgaataatagtgaaaattcaaactgggcatctatgtactttgtatagataaaacaagttctcacgaatcttagggctgtggggatcaaaatcggacagccggaaatgaatatcagtctagatttgggtcagggtctattattctagcccaggcggtgatcgcaaaatggtttgatcggtgtttattctgcgatagacatgcccctgacccaagtatctcgtaataggctgtcaaaagcccagcgcaggccaagtggaccgttgtgggacaggccctggcattttctccaacaaaacatgggaagttctgcggtggggacttttatggagacttggtgatgtcaacgtgttgtccttgtttttcctctttggctttcttttgtattctttttgttttctggtgaggaattaatttactggtattgatatgtgacgtatacatgtacatagtatgtaggactgccctattcttacagtatcataaggattctctacaatcccggtccagactattggatttttgaatttcaaattggactgatgacgccctcgatctttctttgccaaaagaagaattatggcgcgatatacggagaactttggagaatatactctgcccctgttactgtgcaatatactccggacactgcataggcactgcatattacttgcatagttacacgtagtcacacaacaaggggcgttagttgttcgagtccttccaaggtaactatattgtatgtacggagtacatacaatatagttacaattctttttgataaagaacgacagactcgaccacggttcggcaatgtgacgtggggctattaccaaggaacatatgtatatctctgagtacggcgtatccataatggaatatatgtcttaaactctccaccacaatctcggaaaagtatctcccaacaagtccccggccttctcaattgcggagagtgagattattatgaagaggctggtcgcattcccttgcaaccatgcatagtggcgcacatgtcatcggaacagataacgagggctacatggaaaatgtggggtgatacactgaaaaagtacaaagtgagcctgaagccaccaaatccttctatgtctttttttctgtggaacaaccttggaattacaaagtggtatcgtacactccgtactccgtaactatattggatctgcgtaacgggaggtaattatcgcccgaaaccggatacataccctgtcattctttcctttttttttgattgcgatgatatcaacatatggtgtagctcttatctagtcgtcatcatcgtccgagccactactccaccccgtctcgtagtactctcgaatctcgcctagtccatttaccaaagcctcacgctcatcgaccgagactagacgtgcggcacttgccgagatagtcttgatgctctgagctgtccgggtcgaggcggtcaatgcggtaaacacatttactccagtacctgtctcgggggtggggaacatgtcatgcgggaaactgtcaagaataggcatgcggagtggcgtgtggaacctattaatggtgtagaatgtgagtcgcctggctgagacatggaaagttagtgcgtagaacaggaaacctacttttgcaacatcgactctgagttgtatctcctgatcttgcgacggtgcccaatgtccctgtcctcggtggactcgctgtccctttgcggttcgtctccgcgggtgacttggacttggttgaagacatgggcgccttttttgtactccccgtcataggcgaagtcaatgtcaaattcaatttcggcttgcgtcggcccgtcttcattggaggcttccttggtttgaccgtcattgattttcattttattaatggaggattgtaattcgaagatggtgtgcgtgccatcttccccagcgagagaggcctcgaaatgctgatatggccgcaatcgggaaggcagcgtgaccgtctcaatcgctgagactatcagggctgttttctgccattctgattggcgatcaacatggatatagccgggcagcttatgcggaacgtcgataattggagaatagagcgatgccagttgcgagatcgaatgaagtgacctggccttgttcgtatccttcttgaactggtggtgctttataaagttcgaaacttagccaaccggactcgcgattcttcaaaatagcactgtatgactcacccgctgtgtcttggtgccgtcctcaatagcccacacccaaatacttttctttccaaattcatctctcagtcgttccatatactgggctgcgaatccgccccaagcatcatcagatccggagaacagttgcagcgcccgcaagtgatcacattcttcaagcagaggtctcaggtcacggtccagcaggtcatgctccttatcaaggtctttgaatagttcttccccgacattccaatcctcaaagggcatgttctgggagtttaggtcatattcgtttagctggacaatagaccttggatgatagaacactcggttgtagtctgaccagtagcgtacggattccgaggtcaggcgagggggttgagtgcccagatccaagcttttctgatattcacttggttgaattggaggttgcttttggactatctcttgtccatccctgccagacgttagtttgaaaaacttgttcatcaatttaacttgcataccataatccttgacctgctgtggagtcttcacttagctcgtaaagtgcattgtaccggcgcaatgttccaaatccgcccttcagatcatagattactgtgcgtggggtgtaggtttcggagccatctactccaacacccggtcggaaatgaacatcgtgatcaacatctgactgttctccatcataggtaaagtatgattcctagatatatatcagactgaagttcatatgtgatcgtggttgacagtacctgcaggttccaaaaatgtgttgctagataattagcccgctgaccaagctgaagtgtaacgatttcatgcatattgatggacacaattgacacttgcagtgtagcccctcggtgaattttgatatcgacaatgcccgccaaagacgcacagacataaccaaaacatgacgctaggccggatgtggggagtaccgcacgtgagtgactaaccacatccgggaaggtgctgaaaagtcaccagggcaacagtcacatgatccttccaaagagggaaataaacatgtttctgtgtgcgtcaccactttaactccacaacggtgattttccctcgtgaatctcgttatttctgtgatgattctttgaccctgtgatcatcctcggctggatccactacttgtcaagcatctgcgatggagtccccaacacgtcccatcctgagcccctcgaaggcgttgaatccggtctcaccggaacgcatgaatcaacaaaccatccccccctctccctcactaccctctgatctcctcacattacaccacaagaggactagaggtgtttcggaagtccaagccaaagtggcatttctcaacggcctttctcgaggagggaacactgccaactctgcatcgaacaatgccgctctacaacgcgctatgctgggccgcgaggaagccgagtccgccctaaccaccgcacaagaagatttatccgaagcacaaacacgagaacgccggatcagtgaacgcctggaatcattgttggaagagctacatggtacgaaagaacgccaggcccacgaacgatcaattttcgaaaaagaaatcagaaaagcccgcaaagaagcctttcgggctggttcaaccttggtaaaacttcaagaagaattgaaacactcgaaatcagacatcagagccctgaaggaggagctgggagcagaacgcgaggcaaaggacaaggccaagcaggaggcattcgaacgcgcctatgctcttgctggtcttacagaggaactcgaagtcctgaaagagaaattccgtgccctcgaaacagacaaccactcgagcaccctggaagtccgcgcgcatgagattcggagagaaaacttcggaagactgtcaatagcagaaggcgatctcgcgtttttggccaccccgcgcagagcgaaacgagccgctacaggatctgtcctatccccagctccggcacgcgaagaagaccacgcagaagccactccccccaaacgcccacgtttgtcggattgtgcaccaaaagcggagagtgaaaaagttacatccgagaaggctgctgaactagacgaggatatgttggaggagattagggaagagctaatcttcgagcgtcgtcgcagagtcgcagcggaagatatggtgcatttcttgaacattgagtgccagttcgaacgctgctcttgcaggcttgcagagagccaaggtcgtcgctacatttacgatgctgagtactataacaaattccaaaagcctcagatcgaggcggaagcaaaagctcgtgctgaacaagccagcattcagaaagctagtgtgcaccaagtccttcctcatccagcaagcactcccgaggctagccctccccctcctccacctcccgttcaccgatcacctgttcaccaggccaccactcaggtgagatctcctcaacatagcgttcaccaggaagaaacagagtcaagtcgtactccttcagccgcgccacctgttcctgtgcaccagcacaccgcgcctaccatgaaggctgaacctacggatctccccaagatgcagatgccagaggagcccctggttacattttctccagtgactggcacattcacggcattcccatctcctctccgagataatgtcagacctctgcgattggacttcttcgacaaacccgatcgagccgagcctcggccagatgtccacgcaggtcatgccgatgcctctgcatcacccgacttaggaatcgactcgttcaccccctctggggagcctgccccgaccagaatgccccgtcccaccccatcagatggtgccgccgaatgcccgcgtgtaccactgtctgtggaagcaagaccgtcgagacgtgtcgagagagagccctatggctaccgccagcccattaaccccccgaagagagctccttcccgacaagagccacagtcacagcgcacttcgcaccctggcgttcccgatacgcctatcgaccgcgaacaagcactcgcacagatcagggcgcgccgaggccgcacccatagcaagcagcgatcagtcagtgccagtgagcccggcctcgcagctcgcgcctcggcgggatccaacccgacttctgctcggggacctagacgtgttcctaaccccagtcttcgggctgattcgaggaccgagaaagaacttggcgaacgccgagatatgagtgctcctgttcggatgttccgacgttaatgaatgccatgggacgtatgtctcatgatgcatatttatgtctttcttttgcatagtctgccggtgcttgtcctttcctctaatacccccggcgctgcatcgatttgtgtttatttcatttgcgtgacgatcgaaagcaatatgctctgttttgtttgtgtttggatcttttagctccgatgtcatgagcctcagtatactatggatttaatttcccaactgcatgtccttcttttgatccactggcttcaagtgtccgtccctcttttcacatttcctatgtctcatttttcttcttttttacatagatttcgcttgggagtgaacttcatcttatcatggtcagtctggaatcaaatgaaccattaatcatccaccgatatatccatgaaaagatgtaactatattggcctacagtacataatctatgcctaacaacaaacaaatacctccatggagatctcaaagatctcaaagatagaacagtcgcggagagaaccagcctctacaaaaccgagatcccacaacatctaatcctcgcactatcaaccttcgcgccacgaccccaccacaaggaaaccaattcctcaacaaagactcggtccgtcacactccacacatcaagccccatctccgccatatccgccaccgtgatggtgacagtttcatgcgcaccggaatcccggtgaccagctctcgacccatgactcgcagacccgcccgcgctcgaccgctgccggagtaaaggggaattcccctcgtcgccatggatagactgccgagacatggagagcgaagcatcgataatatcatcatcatcgtcgatatacggcgcatcattataggcgtcaccgtcgaagtcgctatcatagcgcgcgatggcgccagccaacgtaacgaagatctgcgacgtcaggcggcggaagtacgcgaccagcgcaacttcgagcggctcctggccttcctggaggggattgcggggtgcgtcggagtgagagggtgggttgtagggtgggcgggcgatattctcgatgcttgccagaaggcgggagtcttgttctgcctgctgttcttcttcttcctctgagaggccctcgcggttctcgccggcggaggcccaccagatgaaggaggtgtaggcaaggcgggtccaggagactggctcgacgatcgggctgaaggagtaggctgagtctgtgtctgaggggtcttgttctggggatgtggggtggtcgttggagaattggcggagtccgcggcggagcattgagtagcggcgggcgtcgcgctgggttgcctttagctggatttgttggatttggttgggtttgccgcctgtgtgatggactagggagattttggggaaggctcgctcggcggtttgttgtgaatatggcgtggggagggtgatgaggacgtcgaagagatcgggtttcatggataagacagtatctgtggaacaggcgatccagcttgggtctgtttcaaggtctattatgctgcgcgacggatcgaaggaggagaggtaggggatatcatggatgccgacgttgaagaggggacgggggcgtagtggtggtatgcgatcgtcggggagtagctgtaggagggagttcggcaatgaggctaagagagatagatcatatactggatctgaattagcagcagctcaataacaatgcgcattggagcataccgtagttgcaagatctgtgtacaggagcctcgcccatgaagaggatccgcttgcgcagcaaagctgctctatagagggggaagatcaaaggtccgaagcactccgtgaactctggaagcgatgaagcggggtggaagggtgtcaaggccggcctgaacgtttctagtggcattgcatcgctgaaggcgcggttgcgactcgagtgatctagtcggtcgccgggtcggaaacgaagactaagaggcgagtcgaggggggagtcaggaattgaagaatcggtccctcctattctatacgtctcccaataatcagacagaaactgcgtatccgacatgttctcggcgtatttcctatcgaagaccattgtcagtcgggatctcccatcctgagtgcctggatatacgaacaacgccagttccttgagtcttggagcgtgtcgccaactcttcccaagtcttccggtgctgagaggcaccagaactccgatcgcaaacatcttcgcattgcgctcggcctccgtggcggggtgattgaggaacgcgctgataccggcatactgttcatgaacgaagtatctgaaggagcgcgtcagcaaagatcaaatccaaagctttcaaagacgttcaaaaacatacaccaggtcctcagtcacattgtgtaaccctgagggcagtgatttgtattcaacaaccccttccacctcaactgttcactcgggagtcagtatcgcgcatcagagcaactgcagccgcggctagataattggttgctcacctcccggcacagttcgcttccacgagaccacatatctgttgtcgcataatgtcagcgatagttcctgagcttgagagctgcgatgcccaggggaaggtgtagaaattacccggccctgatgtcgaagctgatgacgaacaaggcggcaatggctggtggcgactccatagaggaacgtgagacgtcaatgcccaaaggcccaggagattcagataccattctcaaggataatcatgggatgcgacgccattcaagcagtgtcggggaatcacggtaagttgaggggtgagcctggcaaaggggaccttggctattcgaagttagcgcctcaggcagcatctcgggatctagaagtcattgacttcggataaaccgaccattcacggtcttatgtggaaatgtaacccacagctgtgtcgtaagctgtggtctcggcgtcgttcggggatcgtctgtataggttgttgtggaattctaactccggttcttcttactcagatatatcccccgctcagctatctagaggaccaacgccaacatctaccaggcatcatatcaaagaaggcaactttttggattgcaaggaaaatgcgtttctttcattttctcctattatgagagatgcccagaggggcgggctattgattatactactccaatctcgagaaatgtgtctaccataccatatagatggcctccctatcccccacggggccccaccattacgcgttatcttcacggagacgcgccagtttctcctggtcaaagataccaggacccgtgagttcgttcttcaacgttgagatagaaggcacgaagaagtattctcctcctctttggataacccagctctctagcggcatgcgggcctcggtgggatatttgccatcaggaagaccgatagagcgaggcgggtgatggtctagtctctggcctacaaacgcatcaatgcccggaccatcaccaccgacgaagtgagtcttgcggtcagggaagtggtgattgcttgcccagcctaggagaatcaattgttagtggggggctctttgtcacacatgcatgagttcaagtttcgactgcttacgggtagtcaggaagttgaatccattgcggatatcgctctggtagcagacgaacagaagcccacgttccttttcctcagaggactttcggtcagtcatttcttcagccgagacttcctcgccatacggaatgccacgacggataataacagcatggtcgtgctccaagtcagcccgtggtctcattttgcgggtgtgtgccgcaaaggggcactttttgtgctcctcaacggggtggtaatcgaagttgtttgatgagaagagtttctcgtcagagtcatcatgaggagactcatccacgggggttccttgatattggtcagcaaatcgttgcgcgaacttcaaagattctaatttgcgacgaaccgttcttccatcttcccatcaagtatgcagcaagcttttcggctggcttggggtggtcttgagtaaaaggggcgtgcatagcgttttcctccatgaacctatagacttgatcaataccaaatagcaaacaatacaataagaagaggtcacccactcgtcaaattcaggaacaagttgttgaaggtcgcggaaaacaaggaaactgccatctttggcccatgctggttggcccatagggtcgccctcatgtccgcaaacaatcaatctgcatttcatcagtctgagagtccttcattcaacaacggcgagcacatttaccctgactttgtggccttgggctcctttcccacgggttgcctttcatcccagccctcaattacaggctgactgattccatccttgaatccgaaactgaatataaaggtaagtttggccggcaaagactcctgaggttgataagtacttactgctcttttcccttcatagcgcctgggcgaacctttccttctctgaccagtgtgaactctatagaagggttctggctgagtacatatgtatctgggttgagaggtactccctcctcggccaggaaatgttgcttcacctcgctgaccgtggtatccaaatcacgcttcaggcttgcggtcaccataatcacaccatcaatgagtctctcattatcatcggtgggcttgtattcctttcgaagctcctgggggttatcccacccctcgccgacaagatccgcatacatgcccttttcgaacaatccaccacggagttgttgcttccggaagactgttgatagttgcctgtcttttttgacgaaagtctgatcattggaattcacaaatgctccaagctatgagtggtggcttatcagtatttgttcaatctcagtgacaacagttggattgataacttactgcttcaagaccggtcgaggtaaaggcaatgttgattcccggtaaaccttgaagcttagctgatttttttgccagttcggcctccttctttgcccgcttgatggtctcacccatctcacaggcatcttgcccggtggtaatcttgggaataaatgtcttcagtcggttcttgaaatcaacttggtttcgaacgcgaaaaaagagaaagctttgaaacctttttgggagacccggcctgatgaaggtaagtattttgaaagaccatgccgatatgaatactcggtagcatggaaaactcaccaaacatctccttggatatttgccttgatggctgatgtgagactcatgatggaaggtcggactcctcaagagtatacgatctgatgtcaatgaagactacgaacgaacaagggttgacttgaggggacaggatttatatgagaaagacggtgggtacgccatcttctgacgcagcaagaattctatttttctaacaaaaaagcaaaggaaggaggcgggtctgtgattgaaccgtagcattcagttactggatcagatcgtccattagataggcatattcgacaccggtgttattaccgagggagttctaatagtagtgatcgatcatagccacattcagctatacgagcatctccgggggagaggggaagggcatacgcctagagatgcgaactcactgccccacaggtcattgctcgaatgtatgtattcctaattcacagatgattatagggtttcgtttcctcgatgctagagatcaacatggcccacttcccagttacatttgagtgtgggtccctccaagcaaatgagatggcatattttagaatatcacgaacatcacggttcctgggggcttgtgcggagtactccgtgctccatacatataacacattgactgcagtagtggagattgcagaatatccatatccggcaatgtaggatgtacatcgttcagatctctaggcttcagccgtgatccacctagctgaattcgaataccgttcatgtcgaccgaaaattttagtcaatcaaaagatatgctacaagtcatgactgtcgatttttcgggtatgaatgtaacatgataactatgtagggcgctgctgacccaacagcttgaaaatggaaaatcatgaagttaaaggaatgtggggatagctttcagctttccacttgacaaattgtggactcatattgtaatagctcgaggaacgacatatgcagcttacatctgcaagaagctagtgcataggccggtgtaatacccagagagactcagctgaactaaacttccacctttgatgtcacgagaagtcctcgggagctgattcgctgaagattagtctcagcggaagcgggccgggctccaccggaattgccgctagcacgaactttctccggagacaacattgacgttcctctctcatgatcgacatgcagtaaaattacactcgatcagagccaattggtcaatcagagccatgacgacaagttctgggtgcaaccttggaagctccacctataatatgcaagctaggaataacctcacacctgggaacagctgaacttgtacctatccagttcggggtgggcttgcatgccgtgtcttctgcaggatgcgccgatctttgactctgcccgagcatcgccgatcgggtctaatttttggggattttcttcaccgatctaagaaggagtgcccactcacgccgtactacgcaaggtggacctagacaatcattgacgtctatctctcatgctgatcttcagcaatgccgagatagacacttgactggtggcaagcagccccacatttcctctatgagatcgggcttattgtcatagtttgcgtaatattggcataggtcactccgtgctgaaaatcacttagatcctgaatgacagcatggatccagccctggcggagtattccgagtactgcacttatatgtacccttgatcacgtcaagatttctttttgcacagatgaagtgagccttactttcctcttctccttgacattctcttcacactccgataaatttcgcccaatatgaaacttcagtgggccgggctcctcttcggggtttccattgggggagtcaatggcatggccgaatacatgcacgaagctatgagaggagagcgtgtctctggctatggaaaacccgacaacccctcctgggtaccgcagttcaaagatgaatctcctccgtatcaaggccaccgaatctcccgtcaagactggaccgtgatatgtagcagctctgctagcggctacccatgcaaacatgcgatcgatggcaagaacggtacctcctggcacagtgacccctccgaaaagggacatactttcgttgttgatctcggtgcatggtaccaagtgggcgccgtcgttgtccttcctccaattgatacggacacggaaggcctcattacccagcacaagatatgggtcagcgaagatcacgagagctggacggggcctgttgcgtatggaatgtggcccaacacaaacagacagcgaatgtctgcgtttgaaccatcatctacccgatacttgagaatcacgaccgatgccgacaaggaaaacccctgggtcggtatcgctgaactgaacatctatggaactctgtacaccattcctcgtgaccctgcgctgggtgtctggggaccaactcttgatttccctattgtgcctgtcgccggtgctcaggagggatctggcatgcttgccctttggtcgtcatgggccgatgaccagttccactctacgccgggaggtaaaactgttatgactcggtggaacccgttgaccggcgaggtctctaagcgcactgtcagcaacacccaccacgatatgttctgccccggcatttcttatgacggcactggcatgatggtcgtgactggtggcaacgatgcctccgagactagtctctatgattctgccaaagatgaatgggtccgcgcaaccgaaatgaaactccgtcgtggataccaggcgtctacaaccctctccgatgggcgtgtcttcgtcattggcggttcgtgggctggaggttccaacgttgacaaggatggcgaagtttacgaccctgctacccgaaactggactatgctccctgaagccaaagtcagcaagatgttgactggggatatggaaggtccatggcgagcggacaaccatggctggctcttcggctggaagaatctgagtatcttccaagccgggcctagcaaacagatgaattggtactccgctcacgataatggtagtgtgaaggcggcaggggatcgtatggatgatgatgattctatgtccggtaacgcaatcatgttcgatgccgtgaagggaaagattctcactctcggtggctctccggactatgataaatcgtggtccaccaacgccgcccacattatcacgatcggtgaaccgggtgaggagccaaaggttgaaccagctggaaacggcactatgcactacgagcgtgtgttccacactacggtcgttctccccgatggaaaagtcgccatctttggcggtcagcagtacggcgttgcatttaatgaggaacgtgtccaatttattccggaaatctatgaccctgaaaccaacactttcacaaagttacagcagaacaatgttgtgagagtgtatcataccgtgtcaatcctccttccagatgctcgagtgttgaatgcaggtggtgggctctgtggcaattgctcagccaaccactatgatggtcagatctttactcctccctacctcctttctccttcaggtcagccccggccgcgtcctgagatcctctcgggcctgccagatcataccttggtgggcagtaccttgcgtttcaaaacctccggtcgtatctccacagcttccctgatccgtctgggaaccgccacccatactgtcaacactgatcaacgccgcattccacttgatgttactgctacatcatttttcaggaatacctggaaaactaccctgccagaagattcgggtattttaattcctggatactggatgttgtttgttctggaccggcatggtgtgcctagcatcggcaagatcatgatgattggcttggatgacacgaagaccatccagcctgcgcaggatccgctaagcgtgatggaggaacagaacagtaagcatcaatcactccgaactttttgaaatcttggagactaacactgattttacagacattgggacattcatgaggatcgagttgctgagaagaaagtggttttgaggcaagctggcatttttgaagagtccgaaggttgacatagcgtcagcattagttgcagtaattatagtgcatagcagcttcgtatacctataagagttgaatttgaaaagtcaccttgaatactactgctttacatagagaggaagtagtaggatgccagtctaccaatatattgatattgcccttcgtaccgctgcgctgtcctcgactgtcgcatacagataaggatactagtccatagacatctaccaaacgtggcgaaggaattagaacacgtaaatgctatgtagggaacctctattataatcctaaccaataatattcatactccttgtaagaagcgcgattgccatagagtatagctcaaaaagtccaagggtatccaccttacatatgaaaatcgtctcaagttgagtttatactaattatgtcgggataatggagctatcctttccccttgtaacgatatatagcatcaaaatgggtatatcaaagatgctgcctggtcttgactggatcagaagggatactatcaccatccccaggccttcgatcctcataagatatcgtcacctcgttgacttgatagataccagtcgaatgaggacgtggatgaggcagaatatgtctcgtgtctgtgtcttctccgtgctcttcattcctcccactgctcccagactcatcgtcaagatctttgccatgcacggtagtcgttgtcactgtatccatagcaaaggtcggttgttttacgctgcgtccggcgctgctttttccgtagggaggaaggtcggtgtagtttgaggcgtcgttggatgagatgtcgccgcaaatggagcgccagagagggcgaagggctggaatgctgacacaaaggatggtggtggaaagttcagacatggtccatatcaccgagtcggttgtcgcatctattctgtgattagcttgttttcgccgctaacagacaatggattccgaaactcacagagatagtcggatgattgtgttagagcgttgagacctgttgttcggattataccgcaaattccggcgctgtgaatatgtgttagtatgataaaatggaaaggcaatggatcagtagccgaagaactaacaaaatacccagactcaacgagaaacaaatcgtgtatttctcctttttcttcatgttcaaattccacaaggccaaccatgggaagagagcgagaacaaagtcaaggacggcggaccatgctagaaatatgttagaacaactcaagtgtaggttatgcttggaaagagaagaaagcataccgcacatgattgtggccatgaccgcgagattcaaagaacagcctttactcggaattcgcgggtcccagatcgactccactggtgtacattgtgcgaacacagtaacagccaggataatgctaagaaccatgatactgacgatccaaaaccagaggaagagtttgtgcctaggattaatcagtcaaggtcctcgaacttccagtttaaggaacgtaccattttttgacgacaatccgcatgaggaacgcagcgacagcgcacttgctcaaacccatgctaattgctataatactttgcccagccaagagcagtaacattccgtgggtagtctgatcgacagaaagttcgcctgaatgcacacccatgccataatgcgccgctgctgtacagagggctgtaaaggcaaccatcaaaatctacaagccgacatgacaagttagcaaatcagtgcaagagctatggatgtctcagaagagctcatacccaagaagcgagaagcagtagatcatcccaaccagtattgcggcggatcacagtccgtgtgtagactcgcagtgcaagcacaagcatacacaaagtagtttcaaaccaaagtactccaaccaacgttggacccttaccacggagagcaggcatgttggatgtggagtcaagattcaggaagcagacacaatgacatccatcattactctgttaaatataatcgagccaccagagggaaatagtaaccagaataataggggcccggctaatgatctctaattatgatctattgtgattgcgatgatcgtaatccacttccagctaggcctaacggctgaccatacttcgtacctttgaagctttaaaggtctgaaactaaaaagaaaagaattaaaaattcgtcacggacaataacaaggaaatcgtttccagtggtatggtacgatggattagttaagataaccatactggcgggaatagctcgctcgattttattcttcagcttgaatagatgattcttttcagctctgggtgtctctatttctgcctttttgccctgtagttctatgcaattcgacgtcttcattcctacacatctctctcaacgtttatcctcgtcacattttggattgctgcaatgcaataaaaacatttcaaattctttttgaatatcgttccggagcccatccgcactagtgacagggggcgagttgaacgatatatcacacaatacctttgtggatgtcaagtggatatgtacgataatttgtagggttgcaattggttcggccctagcggaaaagaagcatcgtgcttctcctagtctggtggtggtcatagcccatccacgaggcgacctttcccgcgttttaggtgtatgtgcaagccagatcatgcactgaaatagagtgggtcagggcatcgcattcgcatacaagtcttcttatcgggaagattccgagtgatttgcggtttgattaacagttgacagctgggtgccgtgggtaactttcttgacatctacctagtaaggaaaggaacgctgttgccatatgaataacggcatgtcaaacgaaaatttaaattaaagtggagggtcaattaacgaatcatctataactcagccgtcttcgtaagttgtaggtggttccagttgacggggtcttatgcgggtatccactatacctccgtgaagtctcagatttggggaggtcagttggagtactccgtttgtttaacggagtactccatacatatcatatacaatcgaattagcgtattcatttgatatacaacataagttgaagaccctcctttgctgctcgtgacctgcctgagattgtaggtgtaccttcctaattgggttccgcttcttggcaactgctcgggcctaccgctttccccaccgccttatactgtacggagtaataggtcggacaacaggtgcccgcactttatatgtaagccgctagcgaaaatatctactccggagttagttctcccttaagtgctccaccaactattccttcagaacaggaatcgccacgagtagacgaggattacgacacaacaagctttagaagttagtatgagccatttttatactcaaaattcaggcttaaagcttaatcagagtggcagaatacatgggcaaagggaaggagagttataatttggaaggcacccccgaggtccgtatctcgtattgtaatttatttcaatgggcgtaataaacacattttattagttttaacaataaaagtcaatcacttccgccggctctgattggtccaaaaatcattatgaatcctggctgagcgtccacgtctgggtcggtacggggtggatcggcagggccatgccgccttgggcaagccgcgacccgtccgaaaggttgagctccacttcttcgtataggtctcagaatatcccgtaaaagaaaaaagtacgtgatagcgggattggctgagattagagaagacgtggcaaatgatgatatcgaattaaatttgtatagctatatcagcaatagaaagttgaactatgcgaacggaaagcaatataatccacgtatatacacctcaattgatgcatcagtcctggatgtgaccattttctgcttagactgtgccgttcgagctagtgtcctcaacatcaagtgcatcctgaagctccatctcgacgtggtcgccgaacttagcattgatctcctcgagactcagtcccatggtctgcaggggaaaaaaggttagattggagtataacggtgcagggacggaaatcataacatacctcggggaaataaaacatgatggcaatagtgcttgcgacggtaacagcaacaaacaccatatagaacttccatccgatattgttgagagccagtgtgacaggcgcgctgtatgcgacagcattaccgaagaaactgaccaatgcaatggttgctccctcgctgcgcaggtgggtcggccaaatttcggaaccatagacgtatgcggtacattcaatggtggaggtgaagaaggcaccgaagatgaaataaatagcgacggcgccgttgattccaggtgtgtaggttgtgtggaggtagtacttctcgagagcggccatgacactgataatagcggcagagccaaatccaccgatgactgtgaatgtggttagtataagcagctcaacggcaaaggaatccaaaactcacccaacaacttgactcgtccaatcttgtctaggaggaagatattgattccgcaaccaatcaccgcacacacagtccaaacaattccaagtccaagttgcatggtggtaccaaagcccagtgcacccatgagggtaggaatcaaattggcgatggcagtgatgccggttccctggcccatggtccacaacaggatggcgcagagagcgcgcttgcggtgagacgctgtgcggataatgtagagatatccgcttggagtattcttctctgcaacgacctgggccttgatctggaccgcctcagcatgagcaaaagtacctctagggtcccgcttggtacgatgcagatactccaagaccttcttagcctcttcatcacgtccctgttgcatgagccagcgaggagattcagggatgaagcaaagtgtcgccatgtagataacacccacagcagtcagaacgatgaagataaaccgccactgcatctgagtgttgacgaagctgaaggccagcgcgcaaatagcggccaggatatacgccgtcactgttcccacaccgtgcagaccgaccagcattccacgtgtgtgcgggggcgagatctcactcatgtacacgggcgtattcgagaataccatacccgcaccgacgccgcagatgacacgcacgacgataaacatggtggcactgaccgaaccggcctgcaaagcacccgtgataatgacgatcagggcggcaacggcgttggcaattcggcggccgaacttgttagacacgggtgcctgcagaatagcaccgactagggcgcctccgaggaaactagcaagatatttttagctaaagatgcgtttgcctgcagtgaaggttgaacataccctccaagcataccatcttgtacagatgttgcattagaccccgacaagaacttggcgatgaaggttggttgggcgagggatccagcaagagcgttggccgcgaagccgtataggaatcctcctaaacatgcagtgcaagcaacctattgagtcagacaaggattaaagtaactaaggagagctagtcaagtaccaagatattgacgagactggtctcgtgtctatttccatccttgacactttgcgtgcgtgcgacaggtgcactcttctcagggtcatgagttgaactttgagtatcgctcattttgactgttggagtgagactggcaacaggaaaggacgatgcaaaaagagaagccgacaaagtgaactaagagagggactcaagagactttcagtaccccgggaactccccctattcaagtcttagcaagtgttattgtggctggcacactccattcgcaagtgttttgcttaatcttcggcatatgtacttgaggaaaagcgggtcctggccgacttgttccggaacttggctggacctagccctaggtactttggatagaagggataccagtggctggtatagacggtaattattgccagggttaagacgatccttccacgtgggtttcactacatagcattgcgtacaacatacgattatcaaagttgcttgcgtcccaccatcacgaggaatgtactccgcacggagtacaccgtacatagcctgagtttgagggcggagttaattgttactatccaccgtgagatcggcatctagatctgctaagataggaacagggcggcagaagaaaatgcgtttgctgcgtatgtggattaaatgccgtactccgtgcatgaatcgtacttagtggtttttaattgcattggtcttaaagaagagtcatgtaggacgatcagcgtcagctatggcttgacggtctcgaactaacccgcgctaacttgacattggcgtttttagcaaagtcggggcgttcggaaagtgggggggggcattccatggtctggctttttggcttatttttgcttttttcgttttcatgtcgaaacgattacagggatgtctgattcgccagtggatagagttcatggaatgtacccactcaacgttgttagcacattaacggtcctcccaaggaggggcagatgttagtctgtgcagacgggccgaatggtcccagatcaggggcacaatgccgagcaacaaatgcaatagattatcaaacataaaatccgacctggccacactaaaccgaaacaaagccattgttttgccccctattcttcacatacccatatcctattgtcaagccgatcatctgcacaatggatgtcccggaagcgcctatctttcccctccttgaaggcaaggttgccatcatcacaggaggcgcccaaggcatgggcaaggctaccgcgtctgtgttcctccgggcaggggccaaggtagtcattgccgatctgaaggaagagcaaggagctcaggttgcagaagagctttcctctctgggagaagtccgttttgtgaagaccgacatctccaagtcagaggatgtacaaaacctcattaaggagaccgtcagcgcattcggcaaattggacgtggcgatcaacaacgcagccatgactcccgatcagactcccctgatcggtttcgacgagtcatattggcgcagattggttgatatcaatttgaccggtaccgcgctgtgctgtaaatatcagatgcagcaaatggaaaagcagggcacaaagggctcgattgtcaatattgcttcaatcaatgcctattcaccgcagccaaatatgccagcatacacggcaactaagcatgcactcctgggcttgaccaagcatgcagcgactgaaggtggcccgaagggtatccgagttaacgccattgcgcctggagcgatcttcgtatgttttccccacctttaatccagggaggttctaacaatagcagagtgatatgtcggccgcagcgttggagattatgggcaccacccatgatgagtttgcgcccaaggttagcagcttgaacagattcggacaggcccatgaggtagcgcaggggtcgctttggcttgcatctgactgttcgtcgtacgtaaacggaatttgtattcccattgatggaggattcctggccaaatggtagttggtttttcatgcgctatgttgtacatattatcttgtgtgtggatgaacctgcagctcttcgcctaagggtggggtcaaccccctgtgacgctaattatattctcctcttatttcaacgtgaactctcttggtcaaaatgatcccggaagtcttagacaagatggaaacgcacgagagatggttaggtcgatacgggagcttagttcaaggcaatgacaaacattccatctacttttgttagtccagttacatggttgatagtggataacgctattggtctcccatcttgcggtcttgcattaggcaacgagacgactcgaactactctccgaaatgctagagatgaagacatttcgttcatgcgaaacacgttcagttagatggaacaaatcacacgtgttcttttgcttgaacaaggtcgaggctcatttggaccgtatgtttccttgttcaaccgattgcaacaacgtaagatgccggactgtttgtctactcggccgtgtctaggccatcacaccacgatcaacattcagagtcctagaggaaagatgtcattcattccagaggaaaaccgagagatgcagtttaccgaggcggtgattgtaaatgcattgagaatgctcaactacaaagaagccatattgaaacctatcaatcgacactgcttgacgaataagccagatactatttggaactgttcatcacgataatttagagacgaaatgacaaagcttctgttgcagcacactgcaactgggcaaatcatttgtaatcgagacatatgttgtaactgttcaagaaaaccaagatttccagatcaagttcataatggccgatagacgcattgcccaatggacgctgtattgaagatatcccgtgccagaactgagtccgcgagttgtgacttgcgactttgaaatctacagtgcatttgagcttttctcaattagataacaggaagatatgctgttgactttacgtttatggtagactgctgtattccaaggttcaccgacctgggaaccttggaaccttccttgtatcggcccacgcggatgcctccctatgttgtacgcaaatttcaactcctggtgttatctctttgatacgagacgttgaaagctaaatttgacccacaactgtcagttgaagttgaagttcaaaattagatactcgataagaagttgatactgtgttagtagattctttctgctgacatctagatatataaatcaattcaaatttaaagtccattgaaaccgtttgaacgaatataataagaaattcaatgccttgctcgcgacagcatattgatgctctagactccagggtttccagccaattgtggatatatcttccttttagtttcaatttcgtggatccgcagctgcgcttcctttttgactagctagttcagcgcacatacaacggcacggtttatgcgctagtatccacatatcaggcgacttttatacataaagtatatactccgtatacctgccgactattggagtcaaatttatgggtgactacaaaatgaggttgtggggcgagggcgataaacgggtcatagaacggtttcatatgtagcaatatatcgtactccgcactccgtactttgttcacatcttcgtattaagtggaaataacctatcatatattgagcttgtggacaagccaatgatatggctgaccagtttcattaatactgagccatttttcataaatagacgtgtccaggttgtcttcatcccgagccaagtccgtgatctttgctcagttatatcaccgtcaacatgggtagtattcaaggcccattccctcgcatatacgagggcaaactcgctctcgtaacaggatccgcacgtagtaagtccgaaagagactcatttggcatccaatactcatcatcttccaggcattggagctgctatagtcgagaacctggccagcaagggctgcaatgtgatcatcaactatgcgaccgagggctccgacgagtccgcagcagtactcgccaccaaactccaaaaggaatactcagtgcgcgctctgcccattcgagcagacattacctcgcgggaggaatgcgcacgaattgtatccagcgcaaaagaacatttcaccaactcggaaacaggatctttccaaatcgacatcatcgttcacaacgccgcggtgttataccttggcccattggaatcggtcaaagaatccgaattccgtcgaatctatgaagtgaatgttcttgggccacttttacttaccggtgcctgcaaggagtatcttcccaccgatcgctcggggcgtattgtgatgctatcgagtattgcatcgaagacggggacggagaacacttcgctttactcgggcaccaagggcgccattgaggccatgacacgtgtgtggtgtcgtgagctggccgagagagccaccgtcaactcaatcaaccctggtccggtcatgacggatatgtatatgtctgcacctgatgaggtcaaggaggggcttgcgcattggaatcctctcacgccgttggtggctgttcgggatactgatagcccggaggtgcaggagttgggtaggaagtttggaggaagagcggcgtatgcggaggagattgctgggttgattgccacgatctgtaatccggagtttgggtggtgtactggaagtgtcatttctgcaaatggagggttgtcctttagtacctaagtatagttaattttgctaatatgaactctgtgactttttaggccttcaagttagaaggtagttggcttattctgtatccaaacactgcagccctggaggtgggcgaatataatgtctcaggcaccaattactgcctgaggtttgaagaaatcggtgcctgaggcaaaaattcacccgaggacggtgctcaaagagaaacacaagatgcaagcatttcaagcttgttctttattcttgctcgatcaatttgacttctgatgatcttctcttctcaatttgagcctttatttgtcggtgaaattaagcttgttattggccaaactcaaatccacctcttcgcaaaaaaaagccaagcaaacattcctcgacgtctcattttccattcgacttttctacactttcctatataagtgtcttcggacatcgggatataacagtctagatcagggtcaacaccccgaggggtactgcaaaaatgcccagtcctccatctcatccatattaccccttggatgccgatgttgtgggttatcagcccaaccagaccccggtgatggagcttctcgtctctgctggtggggcctgtactgtccttcttggtgtgactttcgcattggccagatatgtgaaacccacactgcgcgtggcggatcgaatcgccatcctgtggtttgtgctctgtaaggcgccaagataaatatcagcttggaggttgaacactgacaatggggatctatagctggaactctgcactgcttcttcgagggttattttatgatccatcatgcccacatggcttctgcccaagatctctttgggcaactatggaaagaatacgctctgtcggattcccggtatatgacttcggacacattggtgttatgtatggagaccatgaccgtggtgagtcccacagctatatacaacgccgacgctaggattcaccgctgattcccaccaagctcctgtggggaccactgtgctttgttgttgcatacttgaccgtaatcggccattccctgcgccaccccatccaggtaattgtgtgcatgagccatctgtacggcgacatgctatattatgcgaccagtttgtttgacgagtatgtccacgggcgaccatattcccgaccggagccgtattatttttggctatattacttcctcatgaacttcatctggattgtggtcccagcgtgtatgccctacagtccccgggatgtctgttataggctgacttggttaatagactatctctaccaaagtatctccacaatctcggccgcacttaaacgccagtcggaaaaggacaagactaactaggtaagacttctttcgtcataactggtatagtggcgggtcgtagtggagcattgggctagaattgtgttggcacgaagtactcagagaatttggtgttgagcttgaggagatacaagggttcgaggggggaaattggtcaatgtatagtacctaggatcatatgatagccttatacccatgattaatcgaggctgtctcctatgaatctattcatgtttcgagcttgaacaggtttaatagatatctccaaccacactaagtgccctatgacgctgatgtacaaggggcgccacccgacgcgcaaccggcgttattaaccaatattagctgccctatctccctagaagaaatttctctctaattttgaggtcaggatcatctttaataaagactcagcaggtcaaatcacgagggaaacctccctttaatgagaagttgttcgcgccgatctggtttcccggcaaccgatttagtgcgggagggggaggcttatcgaacttgtcagccccaacctccaaagggtctgacgcatttgtttatgatccttgaaggattttcctgagatcgtccaaaaaagcaaatgctccaaatttgttaaagacctttgggggctttggtaagtaccaactattgtgacagtcgaagtcaacaaactccgtgttttccgggtatctgctttgacaacaaaacttcgagagagctccctactaagtcttggcttctgcgttgccgtgtaggtaccgatgccatctcctgcgacgtcacaacgtccctccaatcgtggaggaactgcgaaatccgccaaaccgctggacatcggagagccgctaggggtgcacgacacgaacacggtgcgctctagagtgcgaaaatggcagcaacaaggcggcggggtcgttacagtcgacgacccctatgccgatgacggggaaaatgatgcgaagccgaaaccaaagcctgccaaagtcaagatcgagaaactggagaagctggagaagctggcgaaggtagagaagccgaacaaacccccgaccacaaggaagcgcagtcacagcacaccccgcaaacgggtggtgagcgatgagcattggaaacgaacgagaagtcgagcctcgacccagtcctcgtcgcgcaacctgcgcaatctgcccgcacctaagcgcatagccgaatacaccacaaatgaagggcagcttaggtctccacgggggaagcacgacgatagtgacgatgagaaaaaaggtcgcggtccttctaaacccctaattcgagacaccaagtccgcgggcgcacgacagagtatcgacaccatcacggagagcgactatgagacagaccatcctagatctgtggaaccttcggagctctcggacagattcaagacgcgctcgcctcctccagaggatgcgtgggcagcaagcgaggcggatttctctgagttgtcgaggagacgcaagcgcggcccagcaaaacctcccaaaggtggtatattcgcacacatgctcgacgagtccagaaaaatgtttgggattcctgaacccgaaccgccgagacctacacctacgccgactacgggccgtggagccaaaatcgaggcatggctttctgacacaccggatccttttctggatgaagtcgtttctaaaaatgatatgccagctcctctggatctgaagtcaggccgagcaaggcgatctcaaaaacttgctgacggggactcacagcctcctggtaccgagtctgaaccgtcaacaatcagcgagcgccggaagagcaccgatcatccgaagagcactgagtactcgaagagcttcgatcaccataagagctccgatcgcccaaagagctccgattacccaaagagcgctataaataagcactccaagggaagggacagcttttcttcaatcgacaaaacacacaaggcacaagatcgtgagacggcctcagaatcgaaaagagctagtatagataggacttccaagtcatctgtcaagagcaaaggggataattctgtcgaagacaagctttatgaggatagtgctacaacctcggagtccgatttacaaccattctccgatggtggctctgaagtatcaggacttaacgcacctgtaccacttggccgtaagaagcccttcccggtcaccggtcatcatcgtttatcgacgattgcttctgcggaaaccttgagcaccactatcacagacataaccgagcacgtaccgaagtctgcccctatcgaaaaacttgaaataaaactcgaaccgaaactcgaaccgaaacctgaaccggaacttgaatcaaagcttgaatcaacacctgaatcgaaacatgaatcgaaacatgaatcaaaacttgaatcgaaacttgccgaggaagcagaaaaagcagaagaagcagagaaggatgaccagttcgatcccgactcgctacccgtggtatcctcgcaactaaaaagacggcttaccactcacaatgacctcatgtcggtactatccgtctcggcttcgcggagcagaagcatccggtcgaatcggagcattcgtactaacaaaagtcgcctggcccacgcgacagttgaggatctgctctatgaactgtcaggtgacgagacaaagtatatgcgcgagctaaaaacactggtcgggggtgtgattccggtcctcttaacttgcgtgctgtcccgctctgattcagccattgccgcaggcctatttcggccgtctctggaccctcaagatgacgtgaacttctcgaagccaattgttaacatgggagtggcgatcgagcgcctcaagaacctccacaagcgaatcccgcaggacaacgcggatgcattgcttacatgggcgcaaggtgcccagagagtctaccgcgagtacttgaaggcgtggcgtctcggattcaaggatgtcattgtaaatctggctcctcgggaagaagacgaagccacaaacgatgctgacacgaagagcctggatgagggcttggagcgagacgaaaatggcgactttgtagatagcgatggggaaaaggtcgatgtggcctatctactgaagcggccgttagtacgtctcaagtatctagcgaagagtttcaagggtatcaatattctggagccgtccccaaaggctgaagaaacggctaccgcctatcaaattcttgttgacgatgcccgaaaacgcgtccgagatgaaagagcgaggctggaagatgactctgctgcttgtatcgacccaacacgcacaagagacccaatgaccttgggtgtcctccgcgggatcggcattgaccagactcgccatgtccgtgctcgcgatttcttcaatctatctttgtatcattcaagtggtcaacttgtggattgtcgagccgagcttttatatcgagacaacccggcaagcaaagggcctggaggcgatcttttgatttgcgaaatcgatcattcagaccgctggcttctcttcccccctatggacctaagatgtgtttcagctcgcaaaggagactcgaaacatgaaatcgtgctcatgttgcgcagcgcccccgaagatgcaaccaagtactggcaagaattaatctcgctccgcattgacgaagaagaagtcgggtctgaatgggtctcattgctcggatctgaccctattccgccttcaatttgtcgaagccaaagcttcatcagccgagctaagcagaacaaggctcgcaagccctctgctgttgattctccgcccaggtcgaatgatattgacatccccatcggcgagaaggcgaccggtaaacgacgctcgtggacttcaaaagaccactcgtctgagccaagtacgatcagctctgttatcgatgcccggagctctttgtcctcaatcgtcactcgggagactgattacaccactgggggatccgagctgtctaagccagcccgccctgacttacctcttcttccttccacagctcccaggagctcgctaactagtcaggaaaggactctcgctggactcaaacgatccaaggcaaagagattttctcgccacagtgacagcccggcttcagatactgcctctcagcacactgtatctgagaaagcacccgaacacagcgcacctgcggttgccgctcctcaaacaccaagtacaccaacaggaggtagattctatggcgaaacggaggaatcctcagctataggatcaccgagagaaaaatcgcgttcgaggattcctcaaccccagaagacccctgtcagggaaccctcccctgaatctcctagggtttcgtctgtgccttcagtaaatctcccgctgattcccaaaatccgaactcctagcagccaacctcatctttccactccgacacgcatggaccccgaagatgaggaagactatcctcccctcgaattcttgcccaggcaagaaattatggagacaccaacaaggactaggagaaggaagtcgcgaagacggccaaaggatgatgatagccctccacctcccccacctcatcgctcgcctagccctgcccatggcaagcgcgcaactcacccagttctcacccccactagtggtggactcaagcgacgtggctcttctcccctgaagcacgaatatgaaccctctacagcttcagattactcagagaccgactcggacgcgtcaacagtgcgccactattcctactcatcatctgaatactcaagatccaatggcttttctgactcggaggatgattactcctcggtatctgaagacgaagaatatgctactcccaagccaagagcacacgactcgattactgatgccagttctctctcgccttctaattctgtgtcgcagggtggctaccgtactgtgccgctgcagcccaccaagaccagcaaagccattgcgtctgtctttgcgtggtccgacaaaggcaactgggagcttttgttccctgacgagtgtaccatcgtcgttagtcctggcctgatcgaggccttcgcggtggactctgaacctgacgattcctcatcaccaagaccgctcatctctcttgaactgacaccgctcgttcctattcgccgtggcaccgccatcgacattagtatccgctctcctcccaccgagcgatcccaggtcacatccagcaacaacatcatgttccggtcatgcaaccctgacgaatgcgatgccctatatggtctaatcaaccaatcaagaatcaacaacccaacttacatcgcgcttcaaaacgctcgcggtccattcaacagccatgcctctaccttcgaacctgccccgaaagccggcggaggcctgtttggctggccccgccccagaaaaagnnnnnnnnnnnnnnnnnnnnnnnnnnnnnnnnnnnnnnnnnnnnnnnnnnnnnnnnnnnnnnnnnnnnnnnnnnnnnnnnnnnnnnnnnnnnnnnnnnnnnnnnnnnnnnnnnnnnnnnnnnnnnnnnnnnnnnnnnnnnnnnnnnnnnnnnnnnnnnnnnnnnnnnnnnnnnnnnnnnnnnnnnnnnnnnnnnnnnnnnnnnnnnnnnnnnnnnnnnnnnnnnnnnnnnnnnnnnnnnnnnnnnncccagccgcagaaaaagctatcgcgcatcgagctccccacgctctctagccgaaggatccgaaagcagcgtgggaaccatgagcagcgcattttccgccctcaaacgattcggaaacggcagcaaaatgttcaacattgcccgctcaaccatcgaatcccgcactggccgcgaaggcagcatctactctggctccggtgattccggcaacgacccatcccccaactcgggcttaggtcgcatcgccgcagcagtcaaaggcgccgacggtatcggtctctcaaacgccaaggtccgcctgtacgcacgcgaatctgcctccaagtggagtgacatgggcgctgcccgcctgaccatcatgcccgcaccacccaagaacccatcccgccccggtagtggtctcagcggcgacggcagctcaccgcacggtgacaacgcaagtggcgtttcgcctcccgcatcaggatccgcctccccgcgcggtgcgctctcgactgagaagcgcattgtcatccgcggcaagacacacggcgagactctcctcgacgtttgtctaggcgagagcgcctttgagcgcattgcccgcacgggcattgcggtatccatccgcgaggaggatgaagacgcgtccatcgcgaagcagggtggtgtcgcgactggctctggcaagatatttatgattcaaatgaagagtgaggctgaagcagcttatacctttgggcttgttggcaagctcaggtattgatgagtgatgtgatgagtttgatgtgttgggtttatgaacgagctatggacatgaggtatgggggtgcattgttggtttttttctctctttttgcttttccttttccttcttttcttctttatatttttgcctttcttcagtcattattagctctttttcttttgtacatttagaccgcagttgaatgatatcccggccgtggaataatgcaatcgtctctcatctttcttcaccttctattttacagtgacatgtcctcgatattgagccctttatgttgttacttcacatttatctctgtgtctcaaggtttaagtgcttctatatatgccattctactcttgtatatatactatagtccaaataatgaacatgtatcataatacatcatcctaaaggcaattcctgaactgcgagacacacagtagtctaactcctcatttccgccccattggtcttcttgaagacatacccaatcaaattacactcatccttcagcatagaaaccaacacatcatcatcaatggcagcttcaagctcctcatcttcagccccagcctcattagaatcggactcggctgcaagcagagatgggtcaatgtgcgagtactgagctaaagactggtgcatcttatctttgggactcttagtctcgctttctttgtctttcgtacttttctttcccttcctagctatcttggcacgatgagtgccgtcccggatagactgttcttgtttctccatatcgacctcagaagctttaacaagagtatgaggtttcggcagcgactcatccgaatcataaccatcatcaaagtcatcaaagtcagaaggaggatccgacaagtcctcaccctcagacccagcatcaacagtagcaggcgtcgcagccccagacgaagaagcctcaacgtcagccggaacaccccgtccaccacaccgacagcccagcaactcatgcgtctgacaagccctgtcctcgtcgagcctgaacaaatccctgagttcagcagccgagaactgcgcaccactattactggtgctcctctcctgcataacactatctgcaagaccaagcttggtaacctgtctctgccaaatcttctcctcgagactgcccttgagtagaacacggtagatgcgacaaggtcgtttctggccgtcgcggtgaatccgtgccatggcctggatatccgttgctgggttccagtctacatcgaagaggatgagacggctcgcaccaatcaggttgagacctgtcccgcctgctttcgcagatagcaggaaggcgaagcaggagcttgcggggagacggttgaaatcgtccaccaggccctgccgtttctgggcgggtgtgctgccatcgaggcggaggtaggggaggcctagggaggtgaggagggttgcgaggagagagagggttgaggtgtagtttgagacgaggacgattttctcgtctgttttgttgcgcattgtgtcgaggagttggtcaaggacgcggatttttgcgctcgaggagggggataagtggcgatggagaggttggggaatggaggcgatgagggcggtcattgtttcgttgggcgtgttattgttgtttttcgcggttaggagggaagggctgttgctgagctttttgaggattgttattagttgcagggcactttcagcgttgcccattgcggtttggaagatcggggaggcgaggactgctttgtagatgtttgcttgaggacgggttggtttgcagaagagaacgtattcggtctttggtggaaggtatttggccaggatgtctgctgttcggcggagcatgaatttggaggtgagttctcgcagctcttcgcctctggactctcccttctcgatttcctttcgcgttgcttcgggctgtctgctgcgaacaattggggtctcgaactctcgaatgaaggacttgaaagttcctaggatccctggattaacaaggtccacggctgcaaagaactctctcagatcattttgaattggcgtgccggagagaatcactctcttcacggcgctgagcgattggatcgctagaccactcttgttctgcaaggtcttgagcctatggccttcgtccgcgatgataatatcgactccagaaccattcgccaaagcttcctggaccgttctgagtttctcatatccaacaatcatgatactataagcccggcccttggtgaaatcagtcagacgcttactcttgtcgtcaaagacaaaaacgccaatgcgctcattgccgagccacttgcggaactccttccgccagttattgataagagtgacaggacacacaatcaatgccttcttaatgacaggcggggcttcaaagacaggattctgcttgagcagagtccaaagcagcgcaatagtttgcaaagtctttcccaagcccatgtcatctgcgagaatggcaccttcaccattaaacgaccgcatgcccatcacacactcatacaagaacttcacaccctcacgctgatgcggtcgcaagttcttggtcaagagaggatcaacaacaacatccacaacctgctttcccttcggcacagatttcggccgcggcataaccaacgcaccaaccgccttggggtcatgacgcggaacgaccttccccataaccttgggagcaaccgtattcacaagcagcggcgccttataagccgcaaatttcgcgggtgcagttccagggttcgcattagggtttgtaacgagagctagcgagcgcttgagggactgtgtccgctcagcagccgtaggtttgcgtacttcacccttctttcgggcggggagggcttctttcttgggtgtgggcacagggtccggcgtagaggtaggtgctgacttcgtggcttccaggaacactctgccggagaggtattccttgcgcgaaatctcggagtctatctcaatctctttgccggagatagacagtgttgttccgggctcgagacgggcttcgtgcaccttccgtcccatctccttcccggcaatgtctcgtagatacacaaactctccgcgggtagagagaattccgtctccgtcccatgttttgtgctttttggcgcttggtttgcgcctgtctgtgttagctggttcgctgtaactggtgctcaccagggatcaacgttccgaggacctaccagagaacattgaaatatctttcgtcggatgtatcatctttttcaccggatgatgactgtgttgtgctgtcagatcttcgattgttaacttgtaggagtggctttcgactgtctatcggtgattgcacatccttgggtgctggttcgtcttcgaggcggggctttttggtaggacgactgggctcgtcggggttgttggtggaggttgtagcggagttcctaactaaaggggacttgaagggtttgaagaccatgactgtgttggtcttttctccttccaagattaagatggcgttgggatgaggacgcgacaacaggcgcgggacgcgtggtcacgtgagctaatgatctttcgtgtgaaggactgggcttggaggaaaactcgacttaatttagattctagctattgataccgataagaaagtttgcatcttcaaaaaatgtgtttggacagtgaatatcaattatgcttttacagtagctatgtataaagtcgaaaaaaagtctaacacgaataaaaatatacataaggcggatataacgttaggtcgcatcatctagaaagagcattttatagctgtgcagcagaaaaaagctgtgccttgcaaaataaaaatggtatacgcaaaatagtcccccaaacatcccaccaagatttaccgagcatcgtcggccagggccttgtcggtcaacgggacatgcttcgggccctcgtaggagccctggtggacgaaccaccagacggtaacgaaaatagacagaccaccagtcatcagactggcatagttcatcgacgcggcatcagtaggcagagcgtaagggaagcagaagataatagcgaaggcgatgatgtagacacaggccagggagttgacgatgtagccaattgtgtcattcatgtggaagtatccaggcacgaaggaagaacggcgggtcaagatgtgagggaaaatggccatgaagtacgaaagactggacaactgcacgaagcatcccacgaaggcgctgaaggcggtagtcgagccgaggtagatgcacgccaggatggtgacgagaccggtgcagatcagggtggcgttgaaggggttcttgaacgtggggctgatgcgtccaacccatcccgagaatggagtggcgccatcacgagcaatagtccagagcgtacggccggcggtgatgtaacagccacaggcagtgataaaggtaggcaggtaagcgacgatcagaagacccagagcgccgccacgggagccggtggcttggcggtagatctcagccagggggaagaaggtggtcgagtcgcgcacctggtcgaggtcgttgatggaatagaagattgcaatcatatagcagataccagtgatgaaaccgacacccatctgggccaggatagccttggggatatttcgactcggcctggattcaagttagcgattatagatggaatgggaaagaagaacactgacttggggatttcctcagccaagtgagacgagcagtcaggggtgccaacactgtaagcaccgttgagcataccagcgacaaagacgaatccttgctgggcataaccggttccgttttcccaagttgcccacacgagcttatcggtggcatatgcagagccgttcacatgaggcatcacagcgcacacgatgatggtcacgaacacaccagcgagaatgaagaacaaacccaggtttccaatgtgaggtaggaagcggttcatgaacaacacaatagcgcaacaggcccaggtgttgaggaggaagctgataaagacgttccattgtgagggcacgaagctgggatgcatcaattgatacatagacacggtctgctgagccagaatcaaagacatggatgcggcaccgagaatccaagccaggcaattccaccatccagcgtagaatccacacacgcgaccgtacttactcccggcggtgatagttgcccaatggtagacaccactggctgagggcatacccgatgccaattcggcaatggatgcggcgaccagccagtagcagatagacacggctatgctaaacaaggggttagctttggttggttgaactggtttgggagagtggcatacaattcatagatagttcctgccaatccaccgttactcaatgccaccaccacactacctccttgggcaatccatgtgtttccggtggtcacggctaccgcacagatactgagaaggccaaagttccgctctagttcttggcgatggcccgaagcgttaaccaactctccgtccactggaccatcgtgggtgtaatccggtgtaggtgcgatttctttctcagggacgtggccgatctccttctccgtcgaataattgatctcattcccagacatgttggatatgtatatggtaggggatttccctaaaaccagacgaatgcgaggtccaaaatgtacagctcccgaattgaagaatgatatgggaagaatcgaggcgaacacggatgttaagtaaaagggagtcaaaggcgtacaacggtatattatcatgtcacggctaagccgatcaggtcgggtcggtcgacatccacgcattctaattcctcaatctctggccaatcagcattcgcggagtcacatcattcggtggccaacaggtccatagtggggtcgccccagagttcctattggcggagccggagacaagggtgtacaaatgcactcgaagcggaaacttttacaatcaacgccgctgcatggctgaattacgcttaacctagaaggggagcttcagcagaagggggattcccatcccccttagtgtccttttccgtgggttccatctctacttcttgcttttttggggtgattggggctctttggcggggtcaaaccccagactctgcttacttcttatcatcgctactctaaatagatgtctatctaggattcctagagataacaagaccagttatgcatgcttagcataagacataaggcgatggttggaacattccataatccatgcagatattccatgcagcgtacccacataccgtatacttagtatacactattagagatttttcggagatttcccctatttgagattgaaacatatgattttgcaagcgagacaagcgagacaagtgtacttgacaactacactacttgtaaactaaagtataaatgctttactagcccagacacatcaaaggatcaaagcgtcaagcaataggtaacactacgggtataactatgtgggcacaaacagtctctgctgtccatgcgacgggggtgtctcatataaggtagaaattcactcgagttcatcaattggaaaccatcggaggcaatctagactccgaatctctttgcctgggagcacagttgtactagtgcagctgaatgtgggttgcgcagataaggcgactccgattttagcctcagatctagtgggctagtctgatatatattaattaagtagctgctagttaactaacaaagtcttatgactaattaagtttactcaagtgaagtcactaactaactacggcgtagctacacgttaatgaattaatctagagtataatatattgtaaaccgtactgcagtgagattaataaagtctctccttccgaagttcccgaagtttcgaatcttcaaacttcacatcggttcattcaatcctctccaagttgcatgtacaacatatgttgtatcagcccgtctccataaaagatgaaaaaacatccgaatctgtccgtttcccccggggctgggcagttcccaaaatccctcagaaaaaaaggctcgggccaataggtgactggaccatggatggtcggtgatttccccactttttacagttgtggcggcaaactcagaatatctgatttcccgatctggcaggtattggccatttttaatgaattccagtgcaatgtgttaaatatagtcaaatctgccgatagtgacacgcagccggtatatccgaacaaactctctattctgacagttcttcagggcttactccgtatacaatgtatgagttatgtacatgaatactaattgacatggatattggctgatccctcagctcctccaccctccactgtgggccattcccccagatagaaagagccatgtctatcttcgcttaacgacgatgattggatataacaattatatgtagatgtgcttatgtctcccagttcagaaggtaggtaacaactaggttcagtatggatctctcaggaaaattcagcctaaatatcctcggttataaaggcctataaactgtaagacagctgaacttacaccttacatggaaattccctatgcaacggtaaagtggaccaatggcaaaattgttacaaatcagaatgcagcaatgaaagcaatttcccagactctcccgatccaaggaaccaccttgccatccaagcccccactatccaatggcggctatatgccctgtatcttgggttgattggcgttttatcctctgcatcttgccaaaccttgtaccttcaaggctatcattcagcatacttcgaaggttctaacgcgtttcctatctcgtcgtacaatcggcggcttatgcaggagctggaactctatacttaatattgcatatccccgctactctcataaaatgtgagcgcgcctctcgactctcgtttcactccaagatctcgttaacctctattcgaaaaggccagcggtaatgtctggcttaggaggccacttcgccttggaattcgctcatgagacatgggctctgtatgctgtcggcgtactgggtgccgtcttgcgatggtacgatagtaattgaacatcctactatatacaacactgacaaagatcctcgacagggtggctcgttttcgacgcttaggcattcgcaatctccagaccgacgactatcttatgctcttctcggtagtctggtatacaatactatgtgtcgccttaaatcaagtcgcctccggtggggggtcaaatctcatgaccgaggaggacaggaaatcgttaacggataaaatcatcgcggaacgagtgcgcggtagcaaatgggtctttgtgtcggaacattcctttattctttgcatctggagtttgaaagcatgcatgctggtgatctatgcgcgtatcacgtatgttgaacctcgattgggagcatgttcttttctaacgccaatacagtgaaggattaaagcagaagcgttggatcaactatgtctcgatctacgtcggactaggcttcgtcgcaaccgaactgtcactcttcctactctgccacccgttaaaagactactgggccgtcgtcccagagccagactaccaatgctcatcttaccagtactacgaaatcgtgcagggctgcatctcaatctctgccgacgtattcatgctcctcatcgccattcccatgctagtccaggtccgcgtcccgctcaagcaaaagctgatcctgactatcctcttcggcatgggcgtcttcgtcattgtcgccgccgtcctgaacaaggtgtactgcctcgtcccatctctgatctcctacgtctacatgaactggtacttccgtgaagccaccgtcgccatcctagtcaccaacctgccgctcgtctggtcactgctccgcgacgtcttccccgccctcaagagctggaccggcggctccagacgcggcaccgaccgctacaagtccgggccctggaccagcaagggtggctcccacctgcctccctatggcccgcccagccacacgcgctcaggcgacttcggcatgcaagaattcgaaggcaccactacgattaccccgcaaaaggcgactgcttccgatgccagtatcagcgaggggcgggcgagcagcgacgatggctcggctcgcgctctgcgcattcgccaggatatcacggttacggtggagcgggactcgcggccgtcggattatgaggtgaatacttcgcgtatcacccgcgcccgcgaggaggtttaatctttaatcgactctctacacggagaacgttgtcgttctctttttcttatgaatccacgaagtccccgagggcttaatacccagtcctgtatattgtctctattttgtctgtacatatttacttctagacactaattgtgcatatctttttttctctgaatatagagttttccttggagtctcagttgaattgcgtattccattaactataatctccactgtcatgtccacacatctcagcttccagtcccaccgatgtccaaaaccccggtgagttaaccacttttcaaagatgcaaccttggaatacattccatcacagcccgccgatctcccggccccttgcatccagatgccgatcttgtcggtgaagagcttaggcctacgtccgaagaactctgcagggatttggtgaactggcggatatggctcgggcgtcttccttgaaaagcacgtatccccggttccgacaaccaatgtggcgtcgtagccatgcaaagccaagatggttcatgactatcagcactgaggccaagccgcacggagtaactgactagtacatcatccttgaatcagtcacaggctatatacatactacccggaagaccaccgtccgaaatcacgtcgtgacccgagaaaaaaggcgaaaccttgggatcaaccaaaatctcagccgaaatctcaaccgaaaaatcgttcctcaaggttcccaccccacagtcgatcggcacatgaatcttggaaaaaaatctgatacgaaagaaaaagactgggacccgaaagccaaagatatgagggcaaatgcttgaccgagcaatatccaagtggatgtgttcatggataccccaccataccaaatccaggaccctggccaaagccaccagtccactgcgcactaccgtggacgaagctcaagctctcccgaacaacgggatctgcgtggagactagagagacctcgggatgtgacgtgataagggaaaaatggagcaattagcaattgtcgtcggtcatagtatctgcttgtgctcccgaggtaccctttgtgtttggaattgcaatggatactgtgtatggcgtattattagaagactgtctacggagtaaatgtgaactatttcagtcgaccgtaagccgcgtcagtctaataaatctgagtttcaactgagtttcggcgacccagccttgcaggaaaccttgagccgtcaacttccttacaatatatatgatgtatcttatatcttgtaattgacggagtccggcagatatataagcccttctgctagatgtttaaaccctaaaccacgtgtcttcggcctcatttttgagtgataagccgatcagctacccctattcgagcaagctgcacggataatctgctatattagacttctgccatgtgctggaggggttcactcgcaaagttagttcaacggcctcggtacttgcatgatcatactcgaagtcgtactctcctcctattatttgattgcactccgtacactatgttgtatctactccgtaccatagtgggccccgttcagccgagtactgtactatgtatataacagtttatcttttcctaataaggaggtaatttgccttttcctttcctttttcagcaagtgcactattcatttccttttcgctgtttttcttttcgcctttcttctcttctctgcttcggcgtaacccgcttgaccccaccaagaccaagacctcgcccttcgaccgcggctactccgtacatatgttgtatgtgctgacgcgctctgctctgagttatgggcccactctctatttgcatacaaagttgcccaggcttaacctctcgcttacagtttggatggctgcggggatgctcacctaaataggagctttgcccgttgattcggccttcaggtacggagaacgccgtgcatatgcagggttggcaaagaatcatgtaacattacaacatccatggtggcgaattgccgggcggtttgccttcgctctagctgcgtctcaggcatgcatgagtagtctctaggtaggaacggttcttcgttcgccgcgaatgtctcgtataaaaggttgaatgtggttatcacgtgcgacatttggtccaatctttctcgaccaaagtctattcgaaacccctcaatagtgcgagtttacaatataacagaagtatacctcagaaactcaaccttgggagcatccatataagcaaaagtccaccttgaagtctaaataaatgtcttgaggttgcgttatccatgaagggtcccgggcgaaatatatactacggaatgatttctggcatagctactcacaaccttcaatatattcacagatctttgatactacgtactttaagtaggtagtatacacagactagatggcaccgacctaatcttgcgtatgattgaggctagaagacacaaaaattatagactcttgttgtttccgtttattgaacttactttcgagtgcaagagagttcgttgtcatttagatatcacaaaatgaagtagacccgatattataggacacccgctctggtcaagaccaaggccggctatatctcagcacttggacagatagagggtatatatatatccgattctgagataagcacgtcgtctacaatatatttccacccttccacaaggttacatatatcccaagtcatctctggattttgagatactcgagaccttctatgcccatgtcggatgttcacattctatcagggcaacggaagcataccaacctcaccaatcatgtgttcgtcctgcaagatctatgaagtcgatacacctaattagtgtgatgtagttaagagctggttgtggtttagctgtctcattcagaattcattcgactaccatgtgcttttgcttttacctacaatagggttgaaatatacataattttggttgaattttgagatagagaaaatctattaacatgattgtcgaggctaataagccttcgactcgggacgtatccaccctgcgaaggctacataagtacatgaaaagagaatgcgaaagatactgcaacgccgtgcgaacgtaaacaaagccggaaaacaaaatcatgagaaagtcatgtaccaatgcgtttcgcgttttagcataacaaatttaagaaacccgatcctgtttaatcgtacagatcaggcgagacggggttatcagccatctcagcgtcaagatcatcctcgtccatcatttcatcatcgctcatctcactagcctcgccaagatcgtggttaggcaagacatcgatgcgactgtcgcgcatgacaacatgggcgacctcgccatccttgatacttccgcgcagaatgagcacagcaagacggttgaggatttcgcgctcgatgagtcggcccaagggacgagcaccataggctggggagtagcctgctgcgccgaggtagtccttgacttcgtcgctacattcgatagtaacattgcgctcgttgttgtcgagccgcttctgcacctcggaaagacggaggtccacaatcttgcgaatctcccgccttgtgagacggttgaagatgacggtgctggagatacggttaaggaactccggcaggaagtagtcgcgcagagcgttcatcaccaactcgcgggtctggggctcgatgcgaccgtccttggtagtcgggcgggagagatattgagcacccaagttggaggtcatgacgacgatgcagttctttgcgtcgacgacacggccctggccgtcggtgatacggccatcatccataagctgtaggaggacagtgaggacttcctttgcggccttctcgacctcatcgaagagcaagatcgagaatgggcggcgacgcaggctttcggtaagttggccaccggcgtcgtggccaacgtatccggggggtgcaccgatcatacggctgagcgagtgtcgctcttggtactcggacatatcgaaccggatcattgccttgggatcatcgaacaggaattcggcaagcgcttttgtgagcagtgtcttaccggtaccggagggaccacagaacaagaagctgggaggcgcgttagggttactgagacccgagcgctgcaagcgaatggcgttagagaccgaaacaacagcttccttctgaccaacaacaaccttggaaaggtatttctccatgttaagcagcttgtccttttcagtggtcttgagtctgttaacaggaataccggtccagcggccaacgatttcattgatttgatcgggaccaactgcatcggcaaggagtgcttcaccagagtcgcccgcttgagcgcggcgttcagcatcagccttggcccgctcagtctccagacgctcgatgagagctttggtttccgggatggcgtagtattcgagatcagcggctgtctgggtatcgcccaatcgttcggcttcgtcacgcttgaccttgagagaatccaacttgatcttggcctcctgaacttcgcggctgcgctgcttctcattttcgtacttctcgcgcatcggccgaagctcctcgccaacattggcagcttcctgcttggcggcctcgagacgagccttggatgcttcgtcttgctcacggccaagggcgtgaatttcaatttgaagctggcgggcctttctttccagtgtgtcgagggcttctggctcggactcgcgagtgactcggactgcagctgcagcctcatcaatcaaatcgaccgcagaatcggggagtcgacgagctgtcaggtagcgagatgcgagagtggcggcagcgacgatggctccatcgagaatgttgacaccgtggtgagcctcgtatttttccttcagaccacgaagaatagagatggtttctgggactgtaggctccttgacaaggacttgctggaatcgtcgctcgaaagcctgatccttctcgatatacttgcggtattcagagagagtcgtggcaccaatacaatgcaattggccacgagccagcatgggcttgagaaggttggcagcgtccataccgccttcgccgctagaaccagcgcccataagcaggtgaatctcatcgacgaagaggagaatggtatccttggaatcttcgatttccttgaggacacccttcatacgttcttcgaattcaccgcggtatttgctgcccgcaaccagagaaccgacatcaagagaaagaagacggcactgagcgaggttggcagggatatcggcgttgacaatacggcgagcgaggccttcgacaatggtggtcttaccgacaccaggctcaccaataagcacagggttgttcttcgtgcggcgactgagaatacgaatgacacggcggatttcctcctctcggccaatgaccggatcgatcttgccctcacgagccaaggcagtcatatcaatggtgaacttcttcaggttttcattctcgccctcggcatcggcggtcttggagtcgacccgctttgtaccgcgaatttgctggatagcagtgtcgatcaacttgagattgggaatattggcatcgcctagcgcacgctgaacttgtgaatcctggcaaacagactgaatgagatgatcaactgcgacgaagctgtccttttgtgttttcgacaaatcggtggctgcccgaatgactttagagagttggggagaaacactggggttctctggagggggatcttgactgggcaggcggaccaatagcttcattagcgatcggtcgaggagttgagggtcgccgtgggctcgttcaacgacctggcggaagagaggggcggctgcggaatcgtgggatgcgtgggcaccagaaggagtctgttgatcttgagactcatctggggaggggttgagcaatgcgactgccaagtgaagaggcatgatctgggagtgtgcatattgctcgcagagcccgctggagtccagcagggccttgttggcccgatctgtgaattggacgccgttcattttgaacggaagagtggggtaatatcaattaggtttagatgcactgatatagatgcactgatatcccgagggggattatagcagtggtgtaagaatagaaagtaattgagtgagtagacttgagaatgattgacttgaaggacgagaggctagttcatatactctgctgcgcggggtgcccgaagctgccaccacatccatgtcgtcactactcgtttccaccgccttccagaagctgcctgacattgcctgacggtgccagatattgcctgatgtttccgaacaaacgccgaacatcggagattccggagaaaccattaatccatagtaactatggacactcaatgacacttacattttgcgacacgcatgcactataactagtcagtcaattaccgccttattttataaggtaaggtttcccagggccaatgttgttattcaaggtaggtgtcgatccatatttagtcaattaagccttattttgcacgaggcaacagattgtacggaacactccgtaccgcctggcagattgtactggcacatgacatgtcaaagtcagctcacgtgaagcggacgatatagacacgtgatgatattggcacgtggaggcacgtgatccacgtgacaatggagttgctgacctcagccctatccgttccgagatgaggtcagcattctcggattcttggaaggttaaatcgcgcaaaccagaacccttggatgttcaggctctccacgttagagagatgattcggcattgatgttcctcgagcttgcgtgccttgcagtggagcattgaaacaactcagttccaccggctcctcttacccgcaaaagtccagatatgaacaaccgatgtggcagccaggcgccatttacatagcaacaattactttcagccaggcttctgccatgcgtcgcgtatgttttttatatcgtgttccacgatagccgacagaaaatatcctacagctagtgaatgacgtcaggtgggatctccgcagagcaattaaaattcgaagaaatcgatctggaaccttgcccgggatcagacctcccccttgcaagtacctgctcagactaggccgagggatttttatacacgctttatctgtgcctttggaatcagcaccgtttaggaaaccgactttcacggggctgcatgcgagaggagtaccgtctcagatgagaagctaagagacgactggaccgtggatggtggacacttgttccaggtcgacgcatccagaattgaagatcgatccacaggcctgtccacaaggtgttgtcctattggccgtttcatcacgggaaggtggtcttgagattttttgtttcgtgtctccttggctggagagggatgagaaaaaatagaagcggaaaggtttctgcggggcagagaggggcaggaggctttatggcgttcatgatttcaacattgctcccttgcctaggaggcatgttgaagccaatgaagccaatggataagattgcatatgtattatgtactccgtgcatggtatgcagtgctacatgtaccacatctatacgaagtactactataacaatcctactatgtactacaaggacggaccatgctatactacaagctagcttatacgtaaaatgcctgggctaactaactgattcgtagatctgcctccataattacatatttttcatttcttttccatttttccaaggtcaaactaggaatccaactctggtagctctccgcatcccgaaggctccctgaaaaccaatgaaatcaaatcaaatcggcaattaaacctggtacctatgtcatttgttcatataaagagttttaacccccccctctgcatctctttttcattgttctaacgccatagttgcagctgagacaactagaaagctctcacattcgctgtacgtttgtgaagaaaagacccgccacccaaaccagaaaatttctgtttcgccacagcttcaacggctggatttgaattatccctgctttaattgatcagaacgtgagatccactggacgtttatttacaattacctttgttgacttttgctgagattgaacctgcaggttacagttatctcggtcagtattaaatcatcgcaccgcatacaatatgtcagacaagccgatctttgtggctacgcatccgcgagcatgctcgacggcctttgagcgagtaagagatcccgagagattcggataaccaatttattctaaacacatatctaatggcctgcaggtgttcatgactcagcgagatattatccaatgtgtccatgagccgttcggtgatgcattctattatggcccagagcgcctatctagccgattcgcaggcgatgaacatgcgcaagaacgcgtggatagtggattcgccaactcgacatatagtaccgtgatggaaaggctggagcgagaagctacacaggtccgacccttctttctgcgaagtctctcgcgttcttacccatccccctcgtaatgctcttcaagttctccctgtggatcgaacatgagggaagatcccttacctgtttactttttttatcttgcacagatgtagcccgagacaatttgtcccccgtctacaactgtagatcacacactggctccaaattattgaccatggagacccgcacgacggaatggaatgttcgcactttttgaggggatacttaccttgttacagggaaagagagtctttatcaaagatatcgaccactatttgctcccaccgaatggtcagcccgccagcattgccccttctctactgcgcgttaagcgaggagtcggcaccaacggcgactcgacggctaacggtgtgaacggtgccaacggcactcacaccaatggccactctgtcacgccaaacggtcacaccaacggggtcaacggggcctcgaatggaaccaacggcacgacgaacggtgtgaacggtcacaccaatggaacatccaaggaaccctacccgtacgacacgcccgcagagctgggaaacccaacggtgatgcctcgcgagctgcaagagaagttccactgggcattcctaattcgtgacccgcactacagcgtgccgtcgtacctgcggtgcacgatcccacctctggatgaggtgaccgggttccacaactatgatccgctggaggccgggtacgacgagctccgccgacacttcgattatctgcgagatactggattggtcgggccccgggttgcaacgcgcccggagctgaacgcacagactgatgcgcaggcgccggctggcgttgaggtctgtgttatcgacgcggatgatatgctcgatgagccggcgaagaccatcgaggctttctgtaacagtgttggtttgccataccgcccggaaatgctgttttgggataacgaggaggaacatgctgttgctcggaatgcgttcgagaagtggcgtggattccataatgatgctattgagtcgaaggctctggagcagagaactcatgtaagttttgtggtcattgatgtgggggtatggggacttggactttggactaacactgtttatagaaacgtgctgtcaagaccgaggaacagtttgacgccgagtggcagaagaagtacggtgagaagcaagctgctctcatccgccgaactgtcgacgccaacatggccgactatctgtacctcaagtcatttgtcgtgaaggtctagaagaaataagcgaaacaagagtggaagagaaagaagagaaagaagagaaagaagggagacaagggggaacctaccccatattatttcttatgagaacgatttggtacggatggcgccatctccacggggattggttgatgaccatgacgatcttgcgtattgcgtatgctctttgttccatttggccgatgttatagctacttgctggattttcaagtttacttagcttaagatatagttaagtactggctattgaccatgtcgtattagcctaaggttgatatatacttccggcagttccttcctatttgggccatccacggattaataggccagtattccgtagctctttcctccctttcattactttacactgtacctgcctattaagtctcgtcaacacattcgaaaccataaacggaaagtccagaagtatcgaattgggttgaggttgtcttcgcccaagtgttgagaccgtttctgcctcagattattcgtccgggtacttcccttcccttcccttggcagcccccggtcattacttactaccgttagatctattcggagggcgtctgagaaatacaactactcctataagacaggcaaggatttcgagtcgtacaagcgccacagtcattgctaatattcaagctaatagaatcataaaattttcgacgtgtcaacatatcacttgaaatacaaatatgaccaggtattctttcaagtaccgaaattaatggataaaggtcaagtctgctagcagcatggccgtctgaggcagtggtgcgcgcctatttgtggaccttggcgttagccttgagggcactgttcggcacatagagaggcatcgagtcctcccagatcgaatcagtaagcacacgcttattcgagccatcggcattcataacgacgacctgaccataaggctggaaagtctgatcatagagagcacactcgtactggaagccgaacatgccggaagagtaggcaatgcgaccatcccaagtccagatggcatgagcatcattggcaccactgatagtgagaaccttgacatcagttccatcaggacgcatagtgcagatatcgtagttgtaatcactggtcttgcgggtaaagacgattctctttccatcgggggagaaggaaggcaggttatcccactcattggtcaagacagtggtcttacgggtctccagatccagaacacggagtccgagctgggatctgtcgcccagggtggagtttgttccccaaatgcggaagacgatcttcttgccgtcgtgcgagaagctggggaagccggagttgatcacgctgctgttgctgctgagggttgtggtgctctcggacaggacttcggagtacgagccattggcagtggctcggacaagccagccgccnnnnnnnnnnnnnnnnnnnnnnnnnnnnnnnnnnnnnnnnnnnnnnnnnnnnnnnnnnnnnnnnnnnnnnnnnnnnnnnnnnnnnnnnnnnnnnnnnnnnnnnnnnnnnnnnnnnnnnnnnnnnnnnnnnnnnnnnnnnnnnnnnnnnnnnnnnnnnnnnnnnnnnnnnnnnnnnnnnnnnnnnnnnnnnnnnnnnnnnnnnnnnnnnnnnnnnnnnnnnnnnnnnnnnnnnnnnnnnnnnnnnntcgtacaagccagccgccgccggtggcgcggccttggaaccagaagccgactccgaaggagacccacttgccatcgggcgaccaggccgggttgaaggcgcctgcggtgcccttggcgacggacgacgcgtcaatgaagtcggattccatgtcattgtagactaggctctcgtcggttccgttggcgttgaaggaaacaatggaggagtttccaagctgcttctcagtcagagcgatcttgttggtgctggacaactgggggaagacgtcggtgaagcgatattcccactccgtgtcccagctgtacaacttcttgtccataggacggatagtccaggcgttcttctcatagacgaccttcttgccatctggagaccaggcaggagagcggataatctcgctagtggtgttcacgtatccaccggcagtggtgtggagtccttcgataccggaacccttgccggcgtaggcgatagtgccgttggggagatattgagggaagagcttcacgccagttccctcggcttccacgcgacggttagcgcctgtggcaaactccacggagacaatgctggagttggcagagttgagtgactcaggacggtgagcgttccaggtgttctcacgagtcatctcgtagtaaacaatacgctcgccatcgggagaccacttgggcgaaccaagacagtaaccagacttcgacacgacgggacggaaatcagatccattggggcggatagcatagatggacagctcctgtgtatgttcccagccggtgacaccttggaagatggggtctccgtgtccgtaccagccagtgttacggtccgacgagaaagcaatccattggccgtcgggagaccacgaagggcggaaatagccatcaggaagagaagtattggcggcagtcgagacggtatctgtgaggttccatttcttgccactctccagatccaggacccagatgttggccttgtaaccattggcagtggacacataggcgacttgctttccattcggagacacgacagctccgtcttccaccgaggaggttgctaccaactcctcaaggtcagacccgttggtccggacgcggtagatatccgaattaccgtcaccattgcgctctccggtgaaggtgatccattctccatcgggggaaaaggtggcatggtattcatagatagagttggagaggagaggacgttcatcagtgccatcaacattggcaacataaagctctgatgtcccgggagcaatgcggttcatgtagaagattcccttcttgtcagacgacgccgccttgcgcggttcgtgcgcatgcggagagggcgtgttcctcttctcaaggttcatctgctctgcatatgggcaaagagccaaagccgacggcaaggcaaggcccagcagggcaattgaagcgggaaaatgcatagtgaaaatgagtcagtgcaccacagcagttcaaggaccggagcccgttatttctggcaccgccatacttatacataaaacttctgcaggggaaacaggcctgaaggaccgtagcgcacttctctcctccacaggcccaccttcgcgtaatgaagtccgcgttattagcgggccttcatcttatctgatgaagcaagctagcgagtgaccaccgaccactgaaaagtcctgcagaatatttgaccattcatctgattggctctgtcaaatgaagctgtgacttgcagggctcgaaacaaggcaatgatcgtcgtggctcgagatgaacggagaaagcctcttccgtcggttaccgatacattattgttgtaccttggggttttgatataccctgtctgcacaaggggtgtatatctatgcgcctaagtcgacgtacaacaagatcagggtctgcagtatgcaagagagagacgatcagttcttacgcacaactaccgaccctcgatacgtcaattagggctcgggtactggagcgagaaacccgaatgccaagaaattggcacggagatatccctttgatcttgcacaatatcctgctgacccaggcaactccgcctatctcgttcgtcaatataatccaccgaccttgcaagctcgagcgccgacgcaattcttcggcttggcaactaccattctggcacgcaaaatctgcccctttcttggtttaatatcgggaagactcgtaaaactcgagttaccgaattaggacgaaggtctagccaatcaggaagaagacacctattttacaccatctctacatctattattctcgatcaagggtcttccttctgagataacttcgtcagggcccgattaggattcacgatctaggcagtttaggaacgccagttaatggaatttggagtctccctgatcaatgtttcgagtcttcacgagctccttacgaatctccccgagctactagcccctctttactcttcctgcatgcccaacagcataaaaattgaatcgttggacataatcggagtccgaatatcggtccggactaccagattaaggggataaagcgtagatcgaaggtggatcagtctcattgtcgtcttggcactgggctgttgtcaatgaagtgccaagtttccgagaggccggatcctgaagttcgccaataagtacgaagtacagtgtagcgtgggaaggccgttgataatggagccacttgcatgcatttggccaggaggcacgcccgatattcaatactacctacaacatacaacatataactatttctgaattaggaagtctagactctacagggctagccttatggtatgcgaaacacagtgtgctttaatcaagtcaatgagagaggatgtttgttgagaaggcataaggcctctttagtgcttagtgagtaaccattgacggttctcgtgagcaagagtgggtaaagtcaatgcatttgatacgagtcagaggacagaacaagagtggactacagggaccgaggcacgggatccttcaaagcgtagcgtaagcttgtttgttgcctgcccgtgcggtgacttgggactgcttagttatctgggttttagacagctctagacgttgggaggaagctgtagacttgaattgcaagagctcctaccaattcgatgatcgaggctctagaagaccttgagacttcttcggcggaaatgtggatcttacagaagattatgacgagtagattgcgagtagattgctatttaacagccttggcttttcagacactcatggttgtgccatgtcctgaggtatcgttaacttcgataaacgtctggggaagtgttgccccatacaaaccgaagactgacacgtcagagacagacaacagtctcactagcaatcttcggtgatcggcgcaagcatgggtagacgcaatgctgcatcctaggttacaacattatagaagggctaagtgactctagtgtaaaggacgcgaagatcgtaataactggcctggaatcatatcattcgttatggccaagcatataaacacctcatctagcgccaaaactcatcaagaaacatacacaacctgcaaggcattgaaccccggccgaaacagcccagcaagaaaaagaagatatggtatcttcatccaaaagtacaaaccactatagaaaccagtccatccaagctaagttccttcataccgcactgtagccaccgcgcgagcccgctccttgcagagtattgaccacacgacggagccagtcctggaagaggtaagggatatcgcggatggtgtcgccgtgggggaggagatcccagccacgggcgccgtaacggttgtagttgagccaggagccgaagatgagataggcagcgatgccgaggaaggcactgaatagaatgattagtagggcaatttaatgcggaggccacaagaaaatgaagctcctaagaacgaagaaaaactcacatgataagcaaccaggtaaagaagccccagctcttagatccgggggtatcacccttctccttatcgtactcgtcgcaggcatactttgtgcgccaatccaatctcaggatataagtatcatcatccgacggaccaaagctcttgaactgcagactactgctgctgttgcccgagggcacatcgccaccttcctcgccatccgctctccgtcgtcgctccttcgtctcgacgtcatctccaagtgtattcaggccctccagtccagatcggtcgtggtcgcactggaagtcaatgatagcgcctgccttcttggcattctggtcattgccatctcccttgtatgagccgccttccaatttaacgcgtaatccctccgtttccgggtcgagatccttcaatcgcttcagttctgggttcttcgagccctggccaacggggtcgagcccaacgatcgggaaaccgaatgtagagccgccatttccgtcctttgctactcgatgcacgaatccgcaaactggagaaatacataaattagcgtgaacaccccaagcagatgaccaactcaacatggtcgtgtcatctcagcctagaacgtaccgtttttgctagtgccgcacgtcgcatcgccgtaccgagcagcgccgccgaggatattgcagatattcaatcgataggttgtattcgtcacgaagtcatccgtcgtcacggtgtgggtcacctcgtgaacgccttttaggggactgagatcgtatttgtaattgtcgagcttgatgtgcgcgcagtcgaatccggacgcggatgccagactcggtaggagggcggagaggaggagtgaaactccgcttgattgtattcgcattttggtcaatgtgccgttgggtagttaggtggcgatgggtagagtggaaggacgcgggtgaaggctgggatgaggctttcgcgcgaacggagctcgatagctcaagtggagatggtcacgagggacagctgtacacaggacaagtgtaaccagtgcagtttgatcgaaaatggaggagaactggttaccgagttcggggtccctgtgaggttgaaaagtgacgatgacggggatgatcctacggaggtgtttcgtttctccggtggcggtgttttggcactaaaatgtgcttcactcaactcggaatgaagatgcctcaaagtatttgaagctatctctggagtttaatagttcaatgacttttcaacatgttttttatattcttcagagaaagtagcctatgatgtcactccagatgtcacctcagtacccgatggcctaacacccgatgtatggatgtaaagaagatagaagcaaaatagaagaaccgatatatccgaaaaagaagcctacataaggcctattaatactctgcaacctatatattctactgtatagatccctatccctacaaacaccaacctcatccagctcatcgccacgcacagaccacccactcaaacccgatatcaaacgcgcaaaccaaccaacccgcaacgaggacagaacaaatcccagacacgaaagaacaaacaaatcccaaagcccaaccaaataaccacccaccagacagccaaaatggtgcagccgcgtatggtaagcccaacccccaccaagctcaaacgcgacaaaccccaccaaagcccagctcgcaagctaatcggatcaacgcgcagctcacaaaagcggacgagacatcagccaatgatgagaatgaagtccgtcgcgaggatcaggagaagatcaaccggttcagtcggttgcatcagcgcgagaccgtgcttcaggaggagttgaaggggaagcaggtatggactttggacttttgaggattttgttctctgccatgtatcggatctcttgctaactggtttatagaaggataaggaagatttggaagaggtttcgatggagttggagcttgctgatgaagatgagcttgtgccgtaaggaatacctttcccatctattcttgcttttgtttttttcgatcatgttctgttgtggcttttctctgtgattctcatctcggagtattacgaagaaacctaaaaaagagcaagaacaggaagaagccatcactaacaaccttcacagctacaaaatcggcgactcattcttccaactaccgctatcagacgcgcagggaatgctctcgacatcaacagagaagatcgatgcagatgtttctaagctagaggactcgcttggtgagctgcgtgaggaaatgcagcagctgaaggttgcactctatgcgcggtttggtcggagcattaacctggagacttgattaggatgaattggatgtattaccactatcactttttgtctcttgggacttatttctcatgattttctattatctatcttaaaaatggggaccgaggtttgacaatcttcaattgttgtctagattaacatgcggatggatgaacttcatgatatgtttgctcatggcatctgcttcatacctcataattataggtacatggtatgaatatgtagataaagccagacattataagtcaggtggaaccacagctcgttattatcattcaaatagaacacggtagtaaagaggtatctaagaaggcgggaagaaaaaaggagagaagagaaacacaacaggaactaccaacgaaacaagtaggcaaaacagatggctccaaacctgtggcatatatttaggaaccgcagggttccacgcgaatcgacacagataacagtgatgcctagccatctggctagcggtgaccagttcaccgatctaaaaccaatgtgagggtcctccaaatcaataaaactgaagtcatggccgcacttctgtacgccgatattgtcgtgggcctcgtccaggagggatatatatacagcgcgcgcatttgtgttttatgtgtttcccgtgtgcgaaagttgatcaccggaacttggcacggcagcggcccatgatctcattctggcagaccagttcagcgctgaattcactgccgtctagtgtaaggtagatatcgaagtagacacggtagaagatgccctggggtgtatccatgcgctcgaagtcggtctcgaggttcttgcgagagagatcggatgtgagtgtgacgagttccttgatgcctaggaaaatattagtaatttgtacaaggaaaatgcaatctctcaacttacgtggatccttggtgtattcggggcagacatcctcatcgcaggcgtacagcacgtcctcgtacatgagggtagcgccaggtgcaacttgacggaagaagctgaccttgactggttcgccaatcctgacacgctctcccttttggacaaagatttgacgggtgtacttgcatcgatcgcggccatccaaacttggtacacggtactgttcagggtgatatccctccttgaatggctgaagcgtggccatgaggtagtgtcgacgtgccacacggtgcgtgatgacccgctcggtaatacctgcggtgactgcgcccttgacaatggccgccacagagtccatcggacggaccacctttgtctgatactgtggtggcacgtggagcttgatctgctggaagaggtattctgaagcaccaaatccaccgacgaccagaacgttctacacaattgttagcactgcattgagactaggatgagatgctcttacctggagcagacggttctgtgcttgaatggcgataatctggttgcgcaccagctcgaggatacggttcacgacaggctcgaaacactgaaggatctcctcgttcgtgaaggtcatgtagccttcctcaataccagcatcggggaagtcggcctcgatacccacgtccactgcccatttttgtccattattgcggaagtcggccttgatacggttctcgaagtccatgatacacttcgcgtagaccttgcccgcagtccgtgacccatccggcagcttcattttacggatcttggcgcgcaagatgttactgaaattgcggttcagtgccgtcgaaccacacgagtcaccagacccggcagtacattccatcacactgaaaggcgactcttcctccacctcatatgcgatcaaatccacggtaccaccaccacaatccacaatcaaaatagcatcgcccaccttcaagttgagcagtccgctcttggcacagaacaaggcggctgcctcgggctctgagactagcgtgagacggttatcgttctcgtcgcgcaagaagccagcttggatagcagcagtccgggtcgcagccttgccggcgtcgttccaaatagccggtaccgtcagatagtaacggatattgcgttcctcgcgcgtgaacacctctcccagggccttttgcaggttagcgcgaatggcttgtcgtagcttgaagaggtaatcggcagcgacatcgatttcggacttgcccggggggagggggggcaagttgatgggatcaatgtaggtgtttccagagagcatcagttgaagcttgaaccactccaccttctgcacttggggcttggggtatccggttggggcgagagcgtcggcaatatcggggccccatcctaccaccttttggtattggtcgtagtagaggacggtaggaatctaggagagcagatcgttgtcagactagccttcctggggtgtacttgttaagttgcgctcaccttttgttttgcatgggtcccggcgcctggccattccgtgatgatgtcctcgctggcctggttgttggtcgcaaatgcatatgcgacacccgagaaggttgtaccaaagtcaataccgacaatcagttgggccttgctccggccaccaccctcaacttcgaccgcagggttgcgccctggatactgggtattggacagtgacggtggaatgctaggagccatctgctgttgctgcatcccataccccggcgggccgttcaagggagcatttgagttgtattggaggtttgtggtaatgggcgggggctgttgaccatgcgccattggactagttggtcggttgtttgtgtaacttggcggtcggcctaactggggctgggtctgttgatggttcattggaagacttgttgttgatgaactggaggggggtgatgaaggggtgggagggacaatcgggttggaattaggaggagattttttgttcctaaagccaaaggacttaaatcgggaactcatgaggtccatatgaggcaacaaggaagggaaaagagtaagaaaccggaaggggggggaagatgaaagagggggaaagtgaggctgagggatgtaaattgtggagatcaaagagactgaaagaatgacaacacggaagataatcagtttacagtaatttagttttaaaattagcaaattattagaagatgaagaagatgaagaagattgacgatttaaatcccgactctctggttgaggcttctggttgaggctgagaaactggtttatactagttctacttaaatgtggccccatatatagtcattgtttataagataccagaatcgagtacggagtagtagttccgctataaacatgtgaatcgccaaattattcaaattcttgttattcgaatgcattcaggctcacagtttctcttggcgcccaggtcttcgcggggtagggagtatatacatgttcttgagacatgttttattctatgtacatcgaggtagtataactatagaggttcccaagtctccccttttcaccgatccaacactaatcccccagctggattactctctttctttgtccaaagtttggcccccaaaggtgagaaaataaaaataggaacacagccttgtctagcctccgaggtgtgttggctactcccataccgccctatataccgcctgcctaggaagcatggttggtgtgtttattttgtttgaatggggttttgaaccggcagaaccggcagaatcttaaaagcggtatgttgtaccgaccagccccattaaactgccagttttcgcgcgacccagtgggagggttgataaagattctgaagcatgctgttagggtcctggatgtagccgcaagccttccgagctccacgcttctcgaggcggaagcccatatgctccacgaggctcagcacttcttcctcggataactccacattgcccggctcgccaattccagccccctcgtattcggagccacttcctctacgggagtggccgtcatcgaaatgccataataatgggcccacgttgatccagagcccatttggtttgaggctatgtcggatcgtctcgatgtaccgaatgaggtttggcgccgtgtcaatgaagaaaacagtcgttactgcgtcgaacatctcatggctctcgggctgagtatacaatacggtaaaatccgctgcggtcatggacattgtacctaagtggtgaccagcactggcagcctcctgcatggcgaacccggggtgcacctcagggatcataacttgctggagttgctgtgctcgtgattggagattggaaaaatgcaatgcaaaaggatgaagcgcgtgctttgccgccccgttagtatggttcagaacccagctactggctagcagctggtggtaggagatctcattcccctcggcatcatagcctgccatgcagatctcaaaaactagacggcccaggccagcgccagggactaaaacacggatttgctcaccgctatcacgccgtgtctggaactcctcgtgaagatcctgaagaacggggtcatagcagacttccctctcgggtcgtccttcgaggctccagtcccgatagaactggcgtatcgtggaatgcgctttgttgacatctgatgaggttgctacgtcatgccaatattgagtagggtccgttttgtcgggatttgctgaaagaccgaatgagtgaagacccaccgccagaattgcatcggcgatatcggcgttggtatcaatggcatcgtccactttattgaagttatcaaggatggagaacggaggctccgagagcatctgccagtgtgccgagggcagggcatagaaagcttgccgtcgacgatgggtagtattcatatgcgcatttcgccgatattgtctgtggatatattagccagaactttgcgattgtatgttaattggttgtttcgaggcagaaaatattgtaatcaactgtccatccacgtacctgaatgagtcgaatgcagcaaatagcaccctacgctcttcaggatcagcgaaagggttgaagtcacctccccaaccgttctcctcctccccggtctccggcttttgatgctcggccatgcagaggttgtcagcctagctccacactaaaggtgctggtcaatgctacaggttcacccgtcccatgagtgaactgatagtgacgaaggaggaacaattgttgaaaaaacgagaagagtatatggaggggcagacaaaacaagtgggaatccctcctattgggtaaatttatttaccgctctactctccgccttctcatctgggaacagaaacatcataggatgggtgtatacctgtaacaaatataatatagaaatatatatatgcatctgttcatccattagacgttagggatccgatgatccttcatctgcctatatttgactgttgaaaaagagacaaaaggaggacaagtggttttctgccggcataataccttaagggaatgaaccaatagtggctgttatggcgcaccgtattgtagagcggggattcgatatcgaattcccgactttcaacaacttgtctaaataccattctcgccacagatttcttcctttacaccgagaatcggtgaacacaaatatggcgaccgaagccccaccagccgttccttcggcagagctagccactcccgccgtcaggcctcaagagctctcattcagcttgcccagagctttgcatacgacggcacatgttcatttgaccttcttgggtaattgtgccacaatattcctggctacctcatcaccaggcgactcgggcggttctatcaaacccatgggaagtttcgtctatgcgatgcccgatgtaagtaccttatctgccaagtgtggaatccttgccatattcaaggaaagacaatgtcattttctcatgtcataccatatggaggaatggccttattgtttggcatagccccgaaatggggctcctctgttcagtcggagtgggatatgctgcaatatgccgcgcaccccaacctcaagctcccattggcagaggagttgtcaggctaaacggatatccccgaacctgataattcatattgctgatatttccaatataattacttgctatcaggatttggctgacatctatacagcgcacttcgcccaagtcgacaatatcaacaacgctctacacatcaccatctagcatcgaatatacaacgcgcatatccaagatcctggctcgaagattttcgatgccagtctatgttggttgcagtattgacccacatagcatgggattggaagtcgcggaggaaatcgaagggctgaccaagatcgtcgacgtgatcacggagaaatgggaagagcacaaacaggagaaggctgggaatgctaaataaacgtttgaaaaaatgcaaatttattccaatcgacggtcagaaaaaagtacctaattggatctatcactggcctgattactcaacctaacttaccaccgatctcaaccagatcccaacactagccttcaacagtctccgccgggaagcggtcaccaggtcaccggcaaggaaagtcgaaagggatttatagttgtgtcgggttcatggagatcctaccaaccataagtagatgcccttactcgaggacataccacagtttccatgtggatgatacgttcagccgtaatagaaaatcaacttgtatctcagacgcaaatataactaagcttaattgccgcatgtgagacatcacatgcacgttgattccacttttcaccaggataccaggtatctatgttgtgcttatcactattgcatccaatgtggacattcttcaaactccacagtggcatatcgacacttgcataacttcatattccattcctaacaatcgcatcatcagacccacaatgaacgaagaataggaaaaacaaaattctccccacaatacaagcgaaaaaaaacccaaacccaaaaaagcttcgaacctccatctcctcggtaaacaacccgaaacatctccggtccgtcgaggaaaccccccatttggtctgtgacacccgccgactagcacacggaagacatcgggagtctcgggttgacaaccgtgacagttggcaagcagagcaaatcggaatgactcggttaacgggtgtttcatctcgatcgttgtcccgctgtggggcgttgagccgtgggcacacagaggtgaacatattatttgctccaacgtacgttgtatcttgatctggattgcccattctcaatgcccccagagtcaagtggacatcgcctggtttatcccagacacagagtcgtatctgccctgccccttgaaagtgggggcaaaggtcaaagcaatgtcacactatggctcttttcccctcggagccggccgacggtgtcttttatcgtatacaattggacccgtggacggctcggtagcggctgctgatagtcgcgtaccatgatatgtatgtcgaaagtataaaattagaatgggggccgattgcccgtcgcagatatggaagtgttccaattggagccctcgcaccacaccgcaagttccgaaacctaagcagggcaccaggccctcgtgtctagcttcaaactagcaacccaacaaagcatcaaaatatatttctgcagatatcattggggaggggcgcggtcaatgcacttacacgtgccattgcagactcccctgcataagatatggatattagttccggcagaaaacctatttggttagggttaagcgtttagctgcaagacgcatgtcggtccttgccaagttggggtcatgataggcggttatttgtttctttttttaaattgaaaacattcaaattaagttcgtcggcaaagtacgccgtactgtcacgggttgggggtctcggggcgagttccttggaagtacggagtagagtgctttctaaccgagggggtgtgcggggaaaaagggcttgggatggcgacattggaagtggatgggctcatgggtggcactatacctgtgctgattctagtcaaatcatgttgactggcaataccacccggtgagtcgggggaatcattaccctcgcttgatgagccgaccgggaaagttccgagggcgcatccgtgacctggcaatgtttaacgaaagactcccaaagtacggagtatccaagcggctgatgctgtctgtgccccacgatctttgctgtttttgctgtttttgctcttttggcccttttctttcttttcccctctgcacatcattcacagtccactctatccaccggtaaagcccaatgacgtgcaaccaaggcaccagtgggattgcgctggagatattctccattctcggtagtcgacccagattggagggaaacccggactagagatggcttggcgattcaagttgggctatcttgggacatggagtgacagagtcgagccctaacccatgtacccgacgccgtaggagatatacaaccctggacagcgttcggttaaagctcgggaaaccagccaaagccacagccaaaccttggacggccaagtcgaaagctaaaaagcaaaagaaaaagagaaattcgggccaacacatccgattccatgtggtcccggtgcacttccgaagtcgatcatcagggcttgtgcagagggacgagatcttcgtggacgtatcctctttttcgccctcgtttgctatatactcttatattagcattactagtccgaagtatactagattaattgtctatgcactctgcactaaatggaaatgggagttcatggaaatacaactactgactcgtccatcccaatccactgccacctccactgccgatctcgggatcacttgcttgtcttaccagtctaagatgtacatctgcgctatagagaagaggaaatagtcaagtctcggctcagatccgctgaagattccttaaccatatatgcgacggagtacggaagatcgtaatactctgcgtcgatctatagttcgttttttattattttctgtgcatttcccttttcttttctttttttcccttgagttgatttgacattccccaatctccctttcttcacaggattctttgatcttcatctgtcccaacctcggcatttacatactctattgtgccgggctttaggctgcaaatcttttctggctaatttctgaatttcctattttccttttctatttcgatctcgacaatggctttgcagtctgcattcgaataacacctttttaaggaaatcggaatcttgacgaaactgtggcgatagtccttatcttacgcgattctcaccacgtggacttttaatttgtttctcccagatttctctatttgactagagaaatacatcccaacatgcagccctctcattttcgtggtaatcagggctacgaactcccatccgtgcagtcggtgacgtcgggcgcattcccggctcccgcgctgctctccgctccgccgagcaggcctgacagcgggatgcgaatgtctcatctactgcagccgatgcccccagcggcgccggcgacatccccgtaccagcgttactatgactccgcctcgggctccccgggcgaaaccacgcttcccgatgcgccttcaatgggctcggggctgtaccaaaccagcccggggcatagccaacagaccgccgcgcagctacagcagaagcgcgcatatcgccagcgtagaaaagaccccagctgcgatgcgtgtcgcgagcgtaaggtcaaatgcgacgcctcggagtcgtccagttgcaccgaatgtaacaatcgcagggtccgctgtcagtttaccaaagagacgaaccgccgcatgtcgtccatcaagcaagtccaggatctggagaagcagttgcaaactacaaaacagcaattacagcacctgcagacgggcatgatgcggccggatcgcatggtcgatgttgacgagggtgtctcgcagatgattaagttgcctgagattgaatatcgaccggtgcgccgttcgagggcgcccatcccgcaggatttctccgacgtgcggtctaatctccgcgattacggccagggcatcatgaaggtgcccacgccgtatcgccaacagggtgcggagtcattggtgactaggaatgcgccgatcctaccggcgaagaagatagcagatcaactactggcccagtatttcagttgcattcactcggtacttccagtgctccattggcctatatttatcgcagagtatgaaaaggtttatcggatggggtcgttgttgggtgtctcgaatgaatgggcggcggtgctgtttggtgtgtttgcctgcggtgtcatccacacaaacgacgaggatcgagaggagcaagggaagaagtacgtacgcacatcctgtgggattattgatgtctggcacgacgtcttcaatttggatcgtgctcgcgcggcgctgctagcaagcatctttctctacgaggtcaattcgaagtcggctagttgggtgtggattggctcggcggtgcgcgtggctcaagagattggactgcacatcgactccggaccgtggcctgccgtcgaaggggagatgcggaagcgtgtttggtgggggttatacgcttgggaccgaatacttgcgctggaaatggggaagccagtattgatcaacgatcaggattgtgatatcgatctcccatgtcccgtggacgagcagtacatcacagaaggaggcaagatcccagacaaccagcaaaccacgcctttgctagctacgattcacgtcgtccggtccatcggccaactcacacgcaccctacgttcagcaaccatcagccccgccaccctcgagaccttcgaactccacttcaacacctgccttgcaacattcccctctcaattccaccctaagaccgacgaagacctcgaccctcgctctctcgccccggtaatctacctccaaaacgcccgcctcctcctccaccgccacaacatctcccccttctgtccagacatcgtccgcacctccgcactagactactgcgtttcgacagccctcgacacagccaacattctctcccgctgtatgcgcaactactcagtacgcccaagaccaccatgcatctacgacccccactcgcacttcgcctctagcgccagcgccctcctctgcacacacgtctggcgctgcacgctcttcctcctcttccgcggtgaatacggcggcgccctcgtatgcgtgaaagcgctctcagcagtcggcgacgtgcgcactgtcaacgcagcctgcgggcgctatatctccttcttcatgcgcaaattactcggctgcatcgccaattccagtgcctcagtccctgatctcgaccgcaacgaagaaatgatggcgtatgtctcgggcgatatgcaagggaccagcgacggcagctggatatggcacgggtccgagacggggtctcaattggaggggatgggggccccgatgcctacaacctcctcgaactatcggacggagatggatacggatacagattgggaggggtggacgtggatcgagcagtctataggcgttctctttcaggaacagaaacggcagcaggaggagaattacaaggcttctcttgggtcggattcggcttctggtaggtcgagttcggcgcattcacgaatgacgattgctagcatcatttgaacgcatctcactacatcgctccatcggcgtgtatgtgtatggctctagacaagtctagagctcgaaactttatatgggcactgtcacttgcctttatatcctccttgcaaatattgcattgccgatacccatgcccaagtacttgtttacagcctttgttttttatgtatatatctcacgaacggatcggatttcgaccgtttcagtttgcatttgcatgtcttttacttattagcttgatgaaacactgcgcctcaacatatcgacgaagcctgcgacatccaagtctactttgcttgtcggtgaccttgctctttatctcgatgattggattcaacacactatcttcaggaaagctatatacccaatgaccgaatatatttccttttcgaatttctatttcaacttctgtgttctttctctcttcttgtgtcaggtatctgacggtagactgcatattcaggctagtttaacatgggctggtgtattggactgggtgctgtgatacatagagtactgtaatgtactcgagttctttcaccaatctggtgtggacgagtgagaaagaggatcaggctttctcaagtaatattgtgcataggtgcagagataccacgcaataatagagacaaatatgttaagaatgaatttccaaaaaagagggtgacaactcccatgccagtaccctatgcctaggccacgccagccgacataggttggaatgcatatgtttataatcgcggacccagcagatcgaacgccggcagccggagctacctgcatgtttaatccgctaagccactgggggggagggtcgaagaacaagtgttcgtctttaatttataggaaggaacctggggaaacatgcttccgaaaagggaaggtgggtctgtcacatgttgatgcctgaatatgtatccgtttctgcctgattatcatgatacccattgctctttccgaatacattcgaaatgagaaggaaagagcatttcaatggcagctgaggcattttttactgagtgatcgaccccatagaggatcaagtgcagcccgtggggttatggctaatatatacagaatcattatcaacctgtgtaagctcacccaggtgtgaagttactcatgcaaaaatccgtgtctgaaattgttagattgaactatataaggctagaaggcaaatgatgaccttgcggaagaaaagaatctatataagactgaatctatcaacgactgtacaaccacaccccagctgggcaactagctgcttatttccttactcaatagtaagtcacctcgtctccatacaaagtggatccagtgccaggctgcttcacgataccagcttccaccaactcattgatcaggttgaagaccatcagatcacagccgtgaggtgcgaggaaatccaccgcgacaggcagatattcctgcttcagggtaatggtggagttgtacagcgcttggccgactaaattataattgtcattagttatacagtccttgttcaagtaatatttgggttagcatacttggaacgaccatatcgggcacaccagcgaagttggcgatacgagatgtaccgaatcctgccgggacacctggcatgctatatgatacaatggattagcaaacagtccatcaaatatcctagagtgtcagaaaggacaagcacatacctccggtaaacattgcggtaggttggtgtcgcttccgctccaatgtaaagaatcaggctgtctgagcaagtctcctcgtcgaatacctgggcagttgtgttccaccaggtggtgaatatgttcttgtgctcaatttcggtctccagttgcgagtccgggtatccaagtccccaattccaacgggacagaggcacggggttgataaagggcttgcgacctccattggcagccgcgtagtctgcatacagcggtgcgccaatgaggggatactgctgcttcgaaatgaggatagggtaagtgagaggcaacatggtgtcgagggtcgcattggcggcaacagtcgaaggcttagtggattcccagagagcatcgtaatcaaatgcagaaacattcgcaccacccaagaaggacgacagcttgtcgacgaaatcaatcaaaaggccctcagctagggtcgatgcattagttgggaactggatcgtcttgatagactttgggtacttggtgtaggacttcaggcctgcatccttgtacatcacctccgcagcagtgcgccacagctgcacatctcttgtcaagaatccggcggtgtccaaaagcggggacatgggcataacattatccaaggagaccaagttccacgagggtctgttgccgaagcatccattcacctgtgaagggttgcgaattgagcctccggtatcacttccaattgccaaatccaaccagtcataagatccaataccggaaccaggaccggacgaagatgagctaggatcttggtatccgtcaccgcgggcgttgaagggggagtggtagtcgacccaatcatcagtggcgctctcaccgttggcaaactgactggtcttcatctttccgacgatgatggcgcccgcatcaatgagggattgaactgcagggccagtagcgttagcggctgggtacgtttcatagtaagcgcggttgccacagccggttttgacgcccttgatatcataaatatctttaacacccagacgaacctatgagtggaagatagtcagtattgcattctcttgcataatagacgagtggaatacatacaccagccaaaggcttatcggctgtcttggtataatacagccgcgaaggaacaccaatggtcaacgacgcatagccctgcaagcttgccggcaaaacatcatatgtattatcaccaacagagaccaatccctgggtgaaagagcccataacatcggaatacaaccgataagcttcaaaaacggctccactggatggatccaagaaatatggaccagcaggcaggggcgatgaagaggtcaatgtctttgatttcttggtatcatatgcagatgcataccccaagattttagggccccacgaggaatgggttgacacattctccgagggacgcttggaggtaccgttatactggacgtagatgttgtcgaggaagccagtgttgaagacatcgtcagcagactcgtagctgcttaccaaggaatcaaggatcgagcttgtcagcttcacggcatcgctccgaatgaccgtcagaggctgcaagccattgagtttgctgaacacgtgcgaatcggctttcagggtagctactactgtaggaggaatataatagttgtttccattgagctccacggtctgacccttcgaggtgattgtcgcgatggcggtggtggaaagtgacagcagggccgacaacagagccggtagcccataggaactaggaggagcgaccatgatgatcagctaaagattgatagtcttcaaaaggtacttttatcaaaagccgggacattatctgccatatatatacgttccactaccgcttattatttgtctcagttgttgcattgctatcgaggacttccagtgataaggatctagcgaaaaggtgaccaatttagggtaccggactttactggatcaaaatggactagccaggagattaattctcttagtacaatatacatctcttatctttcccagagctatttccgcaattcactgataagtcgagtcacagttggaggtttcatagtcgccattggctcggggaaacaagcttaccccaataagatccacacccacgttttcgtggctagtatgtagcattttgtgaattttgtacctttcgtaccttttgtaccttttgcatactgatgccatatgaaagatacccgatcggaaactccatgatcgagggagaggttatgattgactgggcgtaccaaaccctcttggcacgatcacgctacaacttttgcgttcgggaatccgatcgtatccggtgctatctatctacctgcctgttttgcaggcagatccagccacaatcatagctcttagtcttctagaaaccgattgtgacattcgatgggggcatgggctatcaggcattagtattttgctagcgttccttagttcaggaacaccctcctttcagtacaaacaaccccgcgtctaaatattctgccgcccctaactgaaagttgaattaccgccttcctaatctgttgcgactatagattctgtatagattctcacttctatcttcaaaaaccctgcattttaatcgcaatgttttacctaattcctagaaagttaggtcatatgaccaagttttctatcacttggatgctagaatcatagctttttaatgtcccatcatatgaccacgtccacctttctctatcattatggcattcaaaacatatactagatacggtcactcgcgtccttcggagctatttcgctcacgcgctggcaaccgagatgtcaaaaagagagagggggaagaatagaagatacgtggaggggaggaaaataaatgacgtatggagagttatttactacgacgtggcatcgcactaactggaggcctaaggtcaccgagattcctagtattttcttgaatccttagactccatctattctatcacaaaaatcgcgcatccctcgatgagactactaacttagcaaggtcaaaggatcaagctaatgccatggtaacactaagtcacgtagatcgacggcccgatccatacctgagcgatgatacaccaaccctggatctctacggaagagtggagagtggattaagttccccactgagactctggcgatgtccaggtacatttctccatgcactagcagggatgcagggtatctattttgggaataggcagatgcatttatcgcagtttttcgaggaatcagagaagtttataagaatcgaagatccgcactagcacccgtagccttcgaagcgtccaacccagtctatcaaactcgttctctccgatcgataggttattctctcagaatgatggcactcgtgacatccctggatacacttatgtgctcgatcagcactttcatcctcgactcactgcatgctgcgcctttccaaactttcgccatcttcctcctccttcagttccttctcgccccgaccgtcatagccttggtgtgcagatggtgcggcctagcacctggcacagacaacgagtcgcaaaggacttgcccaacgtgcgacggaagcggggttgttgatgtgacgcaagacaaatcatcacagaccgaagcttactgaattttgagattcaaatcttctattcttgagtcaagcgaaatttagcgaaaattagacgcagccaatctagacgattcatccacaaggacaagactgatctattgtatcaatacattcccaactcgaaatatgctttctgtttatcgcgctttctagtcatgttgagggctgtcattcatgtctttatccactgctctgagaaacaggatatataacgaatttccttgtcttttttgtttcaaacgtaaagccaggccctctcgtatctatgtgcgctttctttcctgcatacttcccgttatgaaattgagtaagtattttcggatcatgggcagctacttcggtattcccttttctattcttgaatcataggtcctggcgggtctttacataagaaccaagtgagagtaatagttaaatatggccacgggtacttgcataccgttagatcagaatttattttgtctgaatagaatcgctgtgttgatttgttgataagcctcggccacgcataccacacggagcagtagtgaattcaggtttccctagatgagcctccgagaggggtcacagattttagctgcggttctacatccaatcctccttgaactcactcattgatcaattgtctcttccaaggtgaatccaacttcttgaccgtcgttatttgtattttgcttgcctgtcctgcatctctactactgccatccgttagttgcgttggataatcgttggtatactggctactccatacgaggctgtttggactacctctagacagaccctactccggactaatgcgactgacgtctcatggctatggaaggtagtagcagcctgcttttcagcggtacagctaatcgggtgagttaggcatcaagagatgtgagcttgacttgagaatcgggggtctctgactatagttggagtagatatatgatgctggctgtggtagtcggtttccttccccatgagttgcgaatcaatgctacagcatctactgttactgcatttgtgtttgttggtacatcttatgatgtatccgccttgattgccttcgcccagcgccatcaaacgatgttcctcctccactcaatcttcatgtaggtatcaatgaaagcggcgtctctcgatcggccacgggctaacaattgcagcccatactcgacgatgaatatgctcgcgctcctgaatatcctgttccacatccacgggcgaagcctgcagacgaataccttgcagattgtaaacatctgcctacccactgctttctcggcgtgttacgctcttgcgggggtcttgatataccgagagtacggatttcaccgagtggaggaagacatgccgctactcactgacgaagagatgcaacgtcgccagttgcttcgtttgttaggggaacggaataccagcgcaccatcgcccgatcttgtgcgaaacacttatcgctttgatttaccggatgaaacagcacaaaaggactggagtcgtttgactccttgaagtatgctatagcgtaggaaatatcggatgtatatgaaaagaaatgaatgtgaaatgtgaatgtgatcgaataatgtattatttcttgcatgtgtagctgcacaatgtgtacaatccgatgtagaaacccccggtcgatcacttggacctcggctttttttccgccggtcgaccgcatttaaacgtccaggaaaccatcatccctgaaatccaccgggacatttaacctcttgtcattgatctctcctgaaaacaaatatgtcaaaacgcgtgacacttttcgacccgcccgcgcaggatcattccaaagctctcatcgagaatgtactcgatctaacgccagtggcggacctcggcccagtatggcatccctcaatctttcgcgaatggtcatattctaacagagaactctcggtctaggatgtcttcaccaatacccgcccgctatggcacccccccggagctcggggcatctacggcggtgccgcgattgcgcagtccctatcagcagccatgttgaccgtccccgccgactacgccgtccacagcatgcactgctactttgtacttgccggagactccgagatcccaattctataccatgtcgagcgggtacgcgatgggaggagctttgtgacccgaaccgtgcaggcgcggcaacgggggcgaccgatcttcaccaccacgctgagcttcagccgggtcggcagcggtggcaagaagaccgttcaccacgccgtaccgaagccaaacgtcccactgccagaagaggccgagccgggcagtttggaagctctcagccatgcaggcagcggtccgtttgaatcaaggaaagcgggaattttgaaccgtacgtctttcggaagcggcatgctgtgcgcgttgtactaatggatgtcgaaattaaataggcacatcccccaacccagaagataagaaggtccggcgacacattcgcgcccgcggcgcaatctccgaacagggtggttaccaagcacacctgtcggcgctggcctatatcaccgacagctatttcatcggtaccatctccctcgttcacgatattccgcgattttcctctccggccgagctcgagaagcttttgaacgcacttaagaacccgtctgatctcgacgatgaggatatcacgcgagctctgaaggagttgaaagaagaggaggctgcggaattgcgccgtcgtttggagggggctttgaacagggccacgaatggcataaaggaggtagatcacaaggaggttggaatgatggtcagcctggaccactcaatttacttccacaatccccgtgcattccgtgccgatgagtggatgttgacggagatggagagtccgtgggctggcgaaggacgaggcttggcaattcagcagatctggtctaaggatggactgcttattgctacttgcatgcaagaggtatgtattcgtttttctattctggagcttagtgctaactcgatcatagggtgttgtgcgattaaagcaagacgacccgccaaagtcgaagatttaagagcttgtgctataccctaccttgaaggagttctctcctatcattttccattcttttacatatcttcacttatagatttgggcttcgtcccctcgactttctctggttttcttgaattgaagctggacattcttagttatagcttcaccgcacgagcatattataattcaatagaacaattgtctcttgtcttcgccgaattacccaaacagtctccctaattaacaaacccaaaacatttgaacgcaagaaacgcgaaagtagaaaacacacaaaacaacttttgcgtgaaacaaaaagccgacccaattttgatcttccagagccaaaatgcgaaacagaaaacaaagatatcctatatagtacaaacctcacctttctcactttcctgattatttcccgtcttttcaccctcaacccgtttgcgatagtattccaaaaccttagcgccccaaacatctctccccttatactcacccacataatcaggccaacttttcatctccttggccagattatccagctcagccattggcagctcatccaacggcgtgagatacgtcttgacaccaaagacgatcgcccccgtgcgcggcagacgacggaaagtctgtctctcgcgacggatcaggatatctgatggcgatgggctgctcagctttttctcgcagagggagttgggccgatagaggatgtcggtcaggttctcgtttggctccttgacttctacaaagtaatttgagcgttccattggagatgttggggttaagcgggcgaggaatctggggagtagggtcagtttcttgtttcttgtttctctgtatggccgtcccctctgatctgatttgaggttacttacttgctgacggagttggcgacttgttggtgccatagtggaacagggccatgcagctgagagatggtccagccaattctctgatttactgtccaccccgttgggaagaggctggcgctagctgccctgtgttggtgttagggttggtaaattgagtattatgcggatttgaacatacaggtagaattccccttcctcgttcatgatcagaatactgagatcctccatcgtaagacgcacagcggcctcgagtgcctcggttgatccctcgttggggtcgcgcccgctgacagtaaatttatcgcctgtcatgcgattatcgacgacctttcggccattttggattgagatttcgaacatatttgggaatctctcgcagagaaagtccgaaacttcctccaatgcctcttggcacggttcaattgactcgggcagacagcgaatgacttcttctcttttctcatgaagcaattgggtccggacccggtgttcgtccatatagttcttatccagggtgagccaattctgggcgtcgagtttgcgaatgtccatcattacacggtatcgctctctgcctttgatgggctgcgctgggtatggtgccatacgcttgacgtcggattggttggagacatttttggagcaatgtttccctttcaatttttgtgatagccactggagcaattgtctttggtgtctcactgcgaaaagaaagacgaagattggaatcgcaactagtgagaaggtggccatactttttctcattaaggctccacgtatagatcgaactgttttcttctggagataaaactaatcaagaacgctcaatgtcaaaggaaggcaaagcgaaatagaaaataaggtgaatatcatagactatgaccaagactagaatatataaatataatttcaagacgggctatgaagtcaccatcggaaacaggcaacaatagaagatcaccagactataattctaagtcagcttcactagtcttagccaaaaaaaaaggttagctcccaggtatggcagctgcattccacatgccccattcagcgaagttgtgcctgcggaactgctgtgatacgcccagggattccccgcaaaaaaaaagtcagagttcaccggggagtactgccagccacatgatctcaggccttttttgaaaatcatgatatttgtctgatttttcaaaagtacatcagggctgtgcataaacaatcagctctgagtgttgccggagtggggatgattacaaccaaaccatctctcactggtcgatgatatctcccttaccagtcggacaagagcgcttggagacgactcggcccatagtttctcggaccaactccctagctagggcccctacgatctagacacagagtgccgtctttaacttcaaacaatcgtcaagctcgtataccgcccgtgcgcctcatgaaccagccgcccagggcttgccgactcggaagaaaaaactagtctcgcacgaaagaatttactatgtaggctccggatatcatcggagaggcaatgtccaggagttgatttgaaccgcgtaaggcgcttgccagctaatgtttgtgtccgtacccaaactccgagagtaccggcatgtttggtctggggtcacgcaggtccggccccagctattaataatttgccgtcttggaagagtctacggagtacggagtacggagtactagcatattgggtctgagtggcccggggatgagccggggattcgttccagttcaggtgcacattacctccgagctaggtagatgggcacatggagtttagtctgacgtatcatcgtcatgcctctcgtgggtggagtggatatcaaggggctttttttgcctttcttctccaacgggtccggactctttcgtcacatccgccccgatttaaagattctaggattactggacctcggttttccttggcttcaggttggaagaaagccattgcatcgaatcagacaccgagaataactacactaacacacactaacacactaacactaaaaataaacacaataaaagaagactaaaacagaattttcaagtaaatgctgtcgcaccatgccacaatttaccaacatacccttttaagaggctccacagactccatctggggttcccgctgcaaccgcacatcccccctttcgcgcaaagcgcgtttgccgatattattcttatagtttgggccggaccctcctacaggagtacgcaagttcgttccatttcccgggtctcggctttgattcttgacatgaagattttcctattagctttttattttcgccttctccgtcatagcttcgaagccctaatgcccctgtcgctattccgacaggctattataaccatgattggatcttcaaagcataaatatttgccaccgcttatgatcttcgcaacttgtttgcgcatttcattcctaactacctcgtagacgagtgcgaaatgctgttcatagtattacatgcctcgtactccgcatataatccttttgtttgttacggagtactccgtactccgtacataaactagttcctaatccagtacgtccacacgggccaatcaatgcctccagctagacttgatctaagacctgtgtagagtctggaccgggcccagtctggacctcgactgcatcttccaatcctggaatccttgaaccgttcatcctggatatggatcacagcaattaaagtacaaaccaatgcaaggcgacgggggatatgacaatcgccccgtcaggtcggcaaagccgatttcctttcttttttcttctctcacgcacagacgtttagatcacctgccgttgttctcgctggttgggttgtatattccaaggtggatctcccgtctacccgggtgcctttattttttgcattagtagcgctccagccgagaaaaacatatatttagttaggacttgtctttgccccttttcgagctattacgacttctttgtgcaagcttatgaaataatgatcaatcataagtaaccacggagtacggagtacggagtagaacacggagtgtgccaagcccaccaacacggaattgggcgctaaacccaaaatggaaaacaactaaaaagggaaattcgaaggtccggattacaattatacatgtagaatttgatcaactagagcttcgataaaggcgcagtttgtatcttatttcttactccgagctcgtgtgataaggatctagactgaagcgtagacttgccatggaatttgtcaagccatcttgtggcactgcaatgaatccacgttttcgcaccattctcgcggatagatgggtgacattggtgtcgtcaatagatgcctatcctcgactaaaggaaaatatcaatgtacttctgccaatgacaagttatcgagaaccgtaattagtcaaaaatgaaatcaatctgacctgcgtgactgccatacctccctattcggtccacgacaatggacatttgtccagacttaaaagtagagatacattgcataggaccagtgacgaggactttgaataactggctgatgtctcgttgacctgcaggtttccaaaacaggaccatcgcaggtcaggatgctgagtagacctagcgtcatcttcacttggcagacagtcttatgcttctcaatcgagcaatagcccataaataagtctcaatgagggtgaacgcaatcaggataactgcaaagcccgtgacaatatagtccaatagcatctttagctagcactgtaagtagagaagaaggtagaaaggctttggagataggtctaaggctttctttcaaaagaggaaatgtacacatatacgtataaaaagttgctcagagaacaaatggagttccaaattcatctcggtgtattataatctgtgactatcttcttggtaagccgattcatcttccaatgggattaagagagaaaaagagaggttcggaacttttgtcccgagtcagatgaaaacttacgttctcattcaatcgccctaacaaagacaaaagtacttgtttagtggggtgatatctgtccaatctcatgtttgacacaaatcctacaacactcttagaagcacaatctaccctagattctattgcacaactctagcaaaacctctattctacatagagtacagatattcagtgtatcgcttgagatagaagatgtttccacagagctgaagcgagaagataaaagcctgaggatggatttccgagctagggttacatatcacggcgttgaaagtgctgatcctcctgctacaagtccagtcacttttcacaccagtatctttcacgatgacaacttacaggttgtattatcgtcgtcgtgatgaagatagactgtgggaatactgttgaccttgcaacatgtgtctactatttgtggacgagaaagatgtttaagttaatgttgccgctagtgaagactttgtcagtctccgacctggcgaaagcttgattgtgatagtttagctcgatgatgacatctggacttttcctagtgatctatagctaggggatgtattccggtttgcgttcaatggtaccacggtagattggtgggattggggtagcaagaaccagacccatactcagacggtggtgaccacgagtacttacgtttccagcagagtcattgacccagctgataataatggcaagcctgaaatagtggtgcctccttccaaccaggtcgagtttacttttgccgtttagatgtattatatctacaaatctaggcagaaggttaccaaatttgcatgaatcaacttggccatcaaattaagtggttcgtacaggacaaaagataagatgtatgacactgtcatctgacataaattaagccagccacctgtgataggtggcgggtgaacaaaaagtgtaccgccaaggttgttgttcaccaggatgggcgttgtgcaaattagttctcgctgaatgttggtcagttcatcgatatctcctatgttgccagatggtcgaagcttgacctgccctaaattggcctgacaaaattcattcatatattttacgaaccgcttctgaacacctgggtttaatgtaagcgggtagagatcagtcataagagggaaaatacctatcgtacctttgggtacctttttgtggttagttgaaacgagctcgggagctttgacaccgctgaataggttgatgctcacctctaacacctgcttcctatcagttggaatgccttgagtaaattccagacccccttccataacggagattaggtcctcaatcattctttgggccataacttgatcatttttcaatgcgccactatcaaagccgggcagattcccaaagagtcatggtgtaccgtcgttgatgaagatgtcaaagtgtggagatatcaaaaggcgaaggtgtcaaaaggtgaagctgtcgtggttgaattcgaaggtttctcgaatagctatccttaattggtatgggaatatgtatatggctttgtttttgacgaatctggatgtatctttcgggcgtattcgagatatctctagggctatatacctagctaatacctatcaagcaccatgccatgctagcattgacttttgtggctattctctttgtattgtttcaggtctgctgcgagcacgcaattctacctaagccagttatcattaagtgaagacggacttcttatcgagatattagaaggctaattacttctaaggttgaggaggctactagaagattaagtcgttacccaaccttttaggtgtcggatcttgggaggtgtaagctgacatcactatggataaattttattagaccaagcaaaaacctttaagaaacatccttcaccctcaaattcagataatacgtttaaatatcagagatgccattttctttcccccgtcgtaaaagagaaccgagccgggatcgagtacatagaaaagtcggaatcatgaggggcgataaagacagttgggaagtcggtctcgaacgatctggggagataaatattctccaaagatatcgcttaagtgaatactggacgctgatcagaagagataacactgggcctccttttatctcacataagcttctctttgtagaggaagacctccgggaaatttttcaagaggagatatctatcaaagagggagccgacttgaacaaagatgccaaagagagacttgatgctttaaatgccagatactggctcttagagcaaaagtgctggcattatcattcctgtctggcagatgggtatcagctaagagcgtttgagctatggcggtcccatcccaaatggtatatgcaccgcgtgcttgttgaagattgtgctagccggcatggctgtgctcgtggatgtgggtgttgtcttagccgcaatattgatcccacgcgccgtcttggagttggacattgtacttttgaatgcggatgttatcgcagagctcgaggctttgacgtttctgaagaagacaaaaaattgctgaaagaacagtgccgcgaagaaataagcaaacttactaagcaccggatcacgcgagtcgccatataggggcttgtcggtgatagctatgagagcccgtttgatatgattgatgcaccaccaagctacgagcagattgcgaaagacaaggcttccacaaaaaagaaggataagactcgctgactggcttcaatcatggatattgctgcatcttgctcactatactgttgctgtgtacctacccgattaagctcttacatcacattgcaggctcataccttccctacaagccattgcttcccccgtagtctacaaaacaatcttgtagcacacgtaagaaattcaccttcacatcattttgctacataatagctatcttcaagatgactctgttaagccttttgttattgtcttgtttgactctttccttcgccggtaagtttgatctcttttcgggcgtctttccaggcgtcttttcagctgtctcttcagctgtcttttttggccactttctgacatttattttttagctcccgtcccgctgcgcccccgggacagcgaggagagccttgccatccttgaatgacggccaccgcgcgtgacgtcctgtggctcgtcgtggccttcctcctggccgtaaaggccatcaacttcctgttctggtgggccaagcgggaggtgaaactgtatgtcaattggtcgcaccgtaggctgtagaaacaatatgctgaccgttgatgtagctagcgactcaagaaggaggagcagcccaagaatgaatgagaaggggggggnnnnnnnnnnnnnnnnnnnnnnnnnnnnnnnnnnnnnnnnnnnnnnnnnnnnnnnnnnnnnnnnnnnnnnnnnnnnnnnnnnnnnnnnnnnnnnnnnnnnnnnnnnnnnnnnnnnnnnnnnnnnnnnnnnnnnnnnnnnnnnnnnnnnnnnnnnnnnnnnnnnnnnnnnnnnnnnnnnnnnnnnnnnnnnnnnnnnnnnnnnnnnnnnnnnnnnnnnnnggggggggcatgtgaagggaagggagggggggcccccgggggagtggaggtatttatattttttgatattgtatataccaacctggccttgtaaatatgatgcgactacagtgtagtgatgtaaattgatagagggagagagttgtcaattcctaaagggcagaatgcccgactatctagttggtacctgccgtactgggctgatggtcaggtgaccaccatgtccaatacacccccctaggtataatcccgaggaatgcactcatctgttgttatcgtttttttttttttattgggcagaaactatatcatctagtataagttgacacggtgagcgggccgccagaaacggctcccattgcaccaccctcctgccatcctcgaccgcctgcccgtctccgccatagccttgccccttcgggtttggcgccctcatcttgtccccctttggtttagccccgtccctggccgcttttaccgccccggccatctgccatgcatctatataacaccgctcgccctctcccctcaacttgtcgacgcactttcccttctctttccctctctaccccctttctttctcgccctttctcgcccccaccctcgcctgcggattggctttcagcccgatgcactgcccctttcattttaccggagatgccgctctatccgacgctcagctcgttctggtcggcatgggctgccgtgccatccagtcgcccaggagcagaacccctgggatgatccagcccgcagccgcatcgttcggtcttgagtcgatactccctcttccttctttcctaggggagtggcagtgcatcgtgctacgaagctatctaggtcgccttctctgctagagcgctttgctcgttgagcgtcactcatttcaccggcctctatcgcatctgcaaagctctggcatactatcttcgatgccgtaagccccgctccattcgccccatctgaggttacattgcacagcccctattgtcgcagcacgactctccgttgcctcgtcgcgaatcccgtggcgcccagttgtcgtcatcatcggtctctccggtctctccgcatccaatcgatgaattccgaaagcacagcgcagcgatatgggccaatagcaagaatgcctcgcacgcgcctgacctcggtcgacgatacatcatacggccaataccggacctcgactgcggaaaccgcaccatgatcacacctttacctaccaaatagagaacgggccgacgactagtgtagggcatgcatcgcaaaggtcgtccgcaaggaagagtagtggtaacttttgccggtaagctacaacccttggttatgaaactggtgtggtcccgcgtcttagatgcagtggcctggatttcaggagccggtcgggatcttctacgctgtggagaaagcagattccgcctcacgggcgaccgtcgtctataaagagactacagttccacccaaatggcaaaactgtaattcaaaaccccttcaaattctcctctcccctacaccctgccccccatcccctatcccccatcccctatccccgatcccctatcccccatccccagttctctattctctgccagtttccctgttttaggactacccacaaccaccacatctcgaagactgtctccgccaattcttccacacaatatgtcaaacactagttttcgcctggaatcctttcggccatggaatcctttccaggactctcccgatatttgccgctacccaattcctgtatcgatgaccgccaccctccctgtcttcaatcccgtctcaaagagtcaagaaagtcatccctataaacctggccagcatccacttcctgcgcgacccccgttggaggtttgcttgaatggcagtctacattcggacgctcaaacaactcgacacgagccggaggatttgggctgcaccaccttccgtcctcatgctgagactttcgactctgaaggcatatcgcaattgcaagatataccaggcaccaaagaccttgcttctaccacaatgcccgatattaattgtctgggtgctaagcatcgatcccccggttttggatcgtgcgacttggagcctgccgttattactgggcagcaccagcaagctgtcgattccggaaaccctacccagactggagagcttccagaccctgaaacaatcgatcccgcaatcctagacgatcatgtctttccaggtgatgagcagacccaagcaacggaaaatatccccggcatcgcaacatgtccaaacagatgtctcttggagtgctcccactctccgaaccaagatccacctcttgaatccagacgacaaaatgcaaagggaacggctgttcctggtcgtcggtccaaagtaaataaacgtttgagtgctaggaagagatcttcaaaacaaaatgctggtcagtctaataaagggcctccttgtcgcagcagcatttcgtttcttgccgttcgtgctcaattttcggcccttcccgtcgaagaccggctagagttcctgtcctggttgtttgagagtgctttacctcgttgtatttctacgccttcgagcagagataccactgtatcaagatacatcgcaaaccaagattcagacatcacatacgactgtgaccagccaagcccaaatatcgaaccagttgatgctcaacatacttcttgtacgagaaaaggtttaccgtggtccgtggaagaaagatctttattggtgaagctcagggaagaacagaatcttgcttggtcggaggtgacgagacagtttgcacagaaattcgccgggagaagtcaagggtccatacaggtgtactggagcacgacgctcaaaaaagagcggcgatctttggtggctgccacgtagaaaatgccatcctaatcgatacttagaccattccctcgttttctcatgcaccacaaaccacaacgtaaataaattgaggactgtgaattcaacaatgtagttgagtattggtggtccaagtacacagttccacactacggtacagcgcttccggaaactggtgtcactgcaattcgtgccaaattctcggccctttcagtcgaaaactgactgcagttcctatcctagcttttcgagggtgcgtgaactcattgcgcttctacgccctagagcatcgatgctgcttctccatcaagccagcgtgacgacataaccgacggctgtggtcctgcgagcttggacactggggtatttgatgcgcagcatacctcaagaaagggactacggtggtcggtagaggaagatcactctctaatgaagctaagagacgagcaaaacctcgcttggtctgaggtggtcaagcaattttcacgagaattccccaggcagagcgaggggtcaataaaagtgtactggagcacagcaatgaagaaaagacggccatcttaccccattgttctcattgcttgacatagttaatcaatattgagatgctaacgtaattcacccccaagcggcgcaccccatccaacctattgaatttaagtgcatatatttcaaccagaacgccattaaattaattaaactaaaaagaatcatttatctggacacctattgatcttatgcccggttcttccacacccactacactttgatgcagcccgtggacgtggttctacccccggttgagggcttccgcgcgtggggggggggaggtgcttcagatgcttccaccaactcagtaatcaattgagaagcttcctgaacagagaggccttcatcggcaggtatctgcctccgggatctagtactttttgcttttgcttctcgttggcagcgcgtaattcgcttacttctttctcaagaaaagcggcagattgcatggtaatctggcaggcttttaaaacctggttaattgccgaactaagcgggctcggagggcttcttgatctcatccgaagcaatgctttaatagacgaagcttgcttttgtaattgaatgtagtttgatggcgtttttgggtcccaatcgctatcccggcttaggggggggggtaggtgttcgaagacaaatattcagctttgaaagtacccgatcgggtgaaaaaggtattaaaccggctgctgagaagctatttttaatcgtctccgatttaaaagcttcaattcgtgcagaggggtatgcttcgaggaagtcatgtttatcaatatggttgatcctggtccgcatttgcatctcaaccaaccggccgtacgaccgttttaccaccgcaaaacaaccaatatcaagtggttgtaaaaggtgagatgaatgcggtggcatacaaattggtatgatcttgttttgcacacaaatctcatcgaattttggggttaaatggcttccgtggccgtcgagtactaaaagccgatatacccccttcatacgagaagaagtagctggaataaagagcttttgtagccaacgaaggcctatttcatctaacgtccacccatttggactaacttcaaagcgccagtcgccaggaaggccttcaaaccatgattcaaggaagaccttgcctttgaaaataatacacggagggagggcccaccccgctgcatttagacattcaattgtagttacccactcgcgatttccaggttataaaagtgatctccgaccgtagtattcacttcttgttataacccttaccgttgcagttaatcccattgcgaaaccagtctcgtcgaagttataaacatcgtcagggttgattccaaattaaaggatagttttttgaacgagattaaaccactctccaataatcttcggatcttcatacttcgcgcgctcgtaattatagcgtctcgagaatcgggaggaaaggagagggtgccgttttatgaattttgtaacccaattttggccaaccgaaagaactagggtagttccacgctttttgaggagaagatccgccatttctcgtaccatagagtgtcacgattggcacttgcggaagtcgtaccttcccgtttgtttgtacaagaagtcgtactttccttccagggtaagcgaggatagggctatgcccccaaagagtataaagaccccacagatgctttacgtttgttttcttttcttttccttcttcatacttgatatttcagttagaaatgcacttctttatttgaaagaacctggcaggtaacatagagggccgcggggctgctccacaagaatccatagagagaatccatttttcaagtgattcctcttcaatttgtgtcaatttacgtgaattggcgcgagaaatcgcgaggttttgtatcccactaaggcagcggcggagggtagtttcgggtacatcaaaacggcgcgctacttcacgaattgaagagatttcttgattcttaaaagcctggatagctagtaagatcctaccctcttgctctactgaatctttagaggannnnnnnnnnnnnnnnnnnnnnnnnnnnnnnnnnnnnnnnnnnnnnnnnnnnnnnnnnnnnnnnnnnnnnnnnnnnnnnnnnnnnnnnnnnnnnnnnnnnnnnnnnnnnnnnnnnnnnnnnnnnnnnnnnnnnnnnnnnnnnnnnnnnnnnnnnnnnnnnnnnnnnnnnnnnnnnnnnnnnnnnnnnnnnnnnnnnnnnnnnnnnnnnnnnnnnnnnnnnnnnnnnnnnnnnnnnnnnnnnnnnnnnnnnnnnnnnnnnnnnnnnnnnnnnnnnnnnnnnnnnnnnnnnnnnnnnnnnnnnnnnnnnnnnnnnnnnnnnnnnnnnnnnnnnnnnnnnnnnnnnnnnnnnnnnnnnnnnnnnnnnnnnnnnnnnnnnnnnnnnnnnnnnnnnnnnnnnnnnnnnnnnnnnnnnnnnnnnnnnnnnnnnnnnnnnnnnnnnnnnnnnnnnnnnnnnnnnnnnnnnnnnnnnnnnnnnnnnnnnnnnnnnnnnnnnnnnnnnnnnnnnnnnnnnnnnnnnnnnnnnnnnnnnnnnnnnnnnnnnnnnnnnnnnnnnnnnnnnnnnnnnnnnnnnnnnnnnnnnnnnnnnnnnnnnnnnnnnnnnnnnnnnnnnnnnnnnnnnnnnnnnnnnnnnnnnnnnnnnnnnnnnnnnnnnnnnnnnnnnnnnnnnnnnnnnnnnnnnnnnnnnnnnnnnnnnnnnnnnnnnnnnnnnnnnnnnnnnnnnnnnnnnnnnnnnnnnnnnnnnnnnnnnnnnnnnnnnnnnnnnnnnnnnnnnnnnnnnnnnnnnnnnnnnnnnnnnnnnnnnnnnnnnnnnnnnnnnnnnnnnnnnnnnnnnnnnnnnnnnnnnnnnnnnnnnnnnnnnnnnnnnnnnnnnnnnnnnnnnnnnnnnnnnnnnnnnnnnnnnnnnnnnnnnnnnnnnnnnnnnnnnnnnnnnnnnnnnnnnnnnnnnnnnnnnnnnnnnnnnnnnnnnnnnnnnnnnnnnnnnnnnnnnnnnnnnnnnnnnnnnnnnnnnnnnnnnnnnnnnnnnnnnnnnnnnnnnnnnnnnnnnnnnnnnnnnnnnnnnnnnnnnnnnnnnnnnnnnnnnnnnnnnnnnnnnnnnnnnnnnnnnnnnnnnnnnnnnnnnnnnnnnnnnnnnnnnnnnnnnnnnnnnnnnnnnnnnnnnnnnnnnnnnnnnnnnnnnnnnnnnnnnnnnnnnnnnnnnnnnnnnnnnnnnnnnnnnnnnnnnnnnnnnnnnnnnnnnnnnnnnnnnnnnnnnnnnnnnnnnnnnnnnnnnnnnnnnnnnnnnnnnnnnnnnnnnnnnnnnnnnnnnnnnnnnnnnnnnnnnnnnnnnnnnnnnnnnnnnnnnnnnnnnnnnnnnnnnnnnnnnnnnnnnnnnnnnnnnnnnnnnnnnnnnnnnnnnnnnnnnnnnnnnnnnnnnnnnnnnnnnnnnnnnnnnnnnnnnnnnnnnnnnnnnnnnnnnnnnnnnnnnnnnnnnnnnnnnnnnnnnnnnnnnnnnnnnnnnnnnnnnnnnnnnnnnnnnnnnnnnnnnnnnnnnnnnnnnnnnnnnnnnnnnnnnnnnnnnnnnnnnnnnnnnnnnnnnnnnnnnnnnnnnnnnnnnnnnnnnnnnnnnnnnnnnnnnnnnnnnnnnnnnnnnnnnnnnnnnnnnnnnnnnnnnnnnnnnnnnnnnnnnnnnnnnnnnnnnnnnnnnnnnnnnnnnnnnnnnnngccaactcagtaatcaattgagaagcttcctgaacagagaggccttcatcggcaggtatctgcctccgggatctagtactttttgcttttgcttctcgttggcagcgcgtaattcgcttacttctttctcaagaaaagcggcagattgcatggtaatctggcaggcttttaaaacctggttaattgccgaactaagcgggctcggagggcttcttgatctcatccgaagcaatgctttaatagacgaagcttgcttttgtaattgaatgtagtttgatggcgtttttgggtcccaatcgctatcccggcttaggggggggggtaggtgttcgaagacaaatattcagctttgaaagtacccgatcgggtgaaaaaggtattaaaccggctgctgagaagctatttttaatcgtctccgatttaaaagcttcaattcgtgcagaggggtatgcttcgaggaagtcatgtttatcaatatggttgatcctggtccgcatttgcatctcaaccaaccggccgtacgaccgttttaccaccgcaaaacaaccaatatcaagtggttgtaaaaggtgagatgaatgcggtggcatacaaattggtatgatcttgttttgcacacaaatctcatcgaattttggggttaaatggcttccgtggccgtcgagtactaaaagccgatatacccccttcatacgagaagaagtagctggaataaagagcttttgtagccaacgaaggcctatttcatctaacgtccacccatttggactaacttcaaagcgccagtcgccaggaaggccttcaaaccatgattcaaggaagaccttgcctttgaaaataatacacggagggagggcccaccccgctgcatttagacattcaattgtagttacccactcgcgatttccaggttataaaagtgatctccgaccgtagtattcacttcttgttataacccttaccgttgcagttaatcccattgcgaaaccagtctcgtcgaagttataaacatcgtcagggttgattccaaattaaaggatagttttttgaacgagattaaaccactctccaataatcttcggatcttcatacttcgcgcgctcgtaattatagcgtctcgagaatcgggaggaaaggagagggtgccgttttatgaattttgtaacccaattttggccaaccgaaagaactagggtagttccacgctttttgaggagaagatccgccatttctcgtaccatagagtgtcacgattggcacttgcggaagtcgtaccttcccgtttgtttgtacaagaagtcgtactttccttccagggtaagcgaggatagggctatgcccccaaagagtataaagaccccacagatgctttacgtttgttttcttttcttttccttcttcatacttgatatttcagttagaaatgcacttctttatttgaaagaacctggcaggtaacatagagggccgcggggctgctccacaagaatccatagagagaatccatttttcaagtgattcctcttcaatttgtgtcaatttacgtgaattggcgcgagaaatcgcgaggttttgtatcccactaaggcagcggcggagggtagtttcgggtacatcaaaacggcgcgctacttcacgaattgaagagatttcttgattcttaaaagcctggatagctagtaagatcctaccctcttgctctactgaatgtttagagcttcgggagcgaattggtggcatagtgggtggttgaagaaggagggtttaagttaattgacgcgttttggatggggtgcgccacttgggggtgaattacgttaccgataaaatcatctagaataactaaagtgttaggtgtggggttgaccaattgcataagatgcatagtttaagaaggctaaaataatatatcgtcgccacgcataggaggtggaaatcgtgggaccaggcttttgaatttgatcggccatcccaaattttactcctttatgcttcaaggggtcgaatccagtagggtattcctctccaatgggagaggtacgatcaaagctgatgatagagatggccaatatcgaaggctgcatattgtacgtagggatacagtctcaggctgaaagggatctcgctagccagtattgaaaatggcccatcaatgacaagatggttgggttgattgaggatttgttgggctacgtattgggtgttacgacactgttcttccggtatgttgagatttaccatacataacacgtcggcgttgggtgatactgaatgaccttgtacgacaatacaatgcggggaactcacggtattttacccctcatgtgatattacataagcttggcggctcagggtaggctcagggttggttcagggtaggctcagagttggctcagggtaggctcagggtggcttgggtagggtcaaattaaacaacgtctcggtgggccgactgatgactacgttgtaaattatgaggaatcttgacgttatcatcgtgtctccccagctcaaaaagcttgtagtaaaaaagaaaacaggagaaaaaaatccttcccttgcatttatgagattcctttattctatagaggattgactagtcgatatcctacggctgaccttccgaaggaacgtagagaaaaaaaagcgagtgatgtctcaggggatgaaagtatatatcaataggaagtcggatttttctctggtcagaataagcggcggcaacgggtttgccttaatttgtctaagttgtcacgattggcacttgcgggactcgtactttcccgtttgggattgtaccgttggtcgtttgcgcaggcagtcgcaccttccttctgggggaaacgagaatagggctttgtccctaaaggggtataaaagcctatttgttgttttcacgtttgtttcttttcttttccttttccatacttgatattcgattagaaatgcacttcttttgttaaaaggaatctggcacgcaatttagcaatgcacttcttctgctagaaagaacctggcacgtaacataagtaagattaagacgctctggtgattgcttcgaaaagagactcatacgatgtcgcatgtcaatagcagtgttgaagccggatgtatgtaaacggccctgtcggaacacctacgagcttctagagctgtttggagatatcatataatactgagggcggtgcaaaggaatctcttttcttcagcacatggctttcgatactgggccagaagtgacacggcaaaaacgacgaaggagatagcgggaaataaatgaatgtaaataataatatacagaatgtgacgatctgggaaggatcgtacttgccaaacgaggcaggaacgactatgccctcgcaccttcccaagtggacgaacgagaattaagcgagacaaacgcaagggtataagaagggaagaacgcgcactcagatagtttctctttttcctttcttcttcgtacttagaatttggtttgaattacactcctttcttctgaatcgaattggctcgtaacacagaatatgtttgccattgactcaagatacagaggtatagagcctcgagatgaataatgaattgcaagaacaaccatagttgactcgagtctatataaaagacttagcgcgagcgcgagaagacaagcgaaagatacactatgtaggtccgacatatcatctctcctccacttctcgtgtatgccctattgatatccctaacagctgacgaaactcccaggatacttcatttttgatacccaaggaactcacctgtcaagcacctgtcaagggttttgtcactgaccaaaccttgtgcccttttggccagctagcataagggacggcctgagcacttgtggtctgtcgtgactctacaagccattcttcaggtgccactataattattctgatgaatggatagtactctgagaaacataccgattacttacaggacgaacgatgcacttcctaggagcttatgatccacaatccggctaccaagaaatccggcagcatattttaattaagcataatttgtgagaccaactggtattataagtagtgtttctcatcttaggttttcactcgtacccgtttagcttctcgttgtctcaagcgtattgctacaacaatcacctctgtatactctattctttgcctcaaaataccatcccaccactcacaaaaactgcctcgcagcgatacggtttctgcctcttggaagaacatctgaatgattcattccagtgtcccagagtgatcgcctattcagttgttgtacctacgccgccgaatagctactacgcattttacttcacaagtccagagtaaggaatacgatatttgattcccccacaagacctcttcgtccctgtcggccatgccgcaactcaaaaatccgatgcaaccgtgaagtttctcattttcaagcttgtatcaagcgaggtaaaagctcgttgtgtgtctatgagatgagagtgctaaaccaaagttctgctcttctaggaccagccggcaaaagcaagtgcaggaggatgaacttggcgagcatcacattccatagaaggcttttgggtcgcaacccgaatagtatttgcagcacgaaaagaggtactacaagcgaagagctgcaacacactattgagccttcagatgaagcagatatcaagcacttggatcaaagtcattctaggaggggcgatttggcacctcacgaggcgttaccaaagagtattgcggctacaaatgcggaggaaactttgatttcctaactaaattatggccgtgcagctgttgaagttattcttaaatggccacagcatatcaggatctcaaacaacaaagctatatgtacagatgacccctccggtagccaatatcaacccgtgagaaagctaagaccacaaggctgactatcgataagactttgtcagaatctaggatgaatactgtcatttttcatccctgatacagttggatcacgtgactnnnnnnnnnnnnnnnnnnnnnnnnnnnnnnnnnnnnnnnnnnnnnnnnnnnnnnnnnnnnnnnnnnnnnnnnnnnnnnnnnnnnnnnnnnnnnnnnnnnnnnnnnnnnnnnnnnnnnnnnnnnnnnnnnnnnnnnnnnnnnnnnnnnnnnnnnnnnnnnnnnnnnnnnnnnnnnnnnnnnnnnnnnnnnnnnnnnnnnnnnnnnnnnnnnnnnnnnnnnnnnnnnnnnnnnnnnnnnnnnnnnnnnnnnnnnnnnnnnnnnnnnnnnnnnnnnnnnnnnnnnnnnnnnnnnnnnnnnnnnnnnnnnnnnnnnnnnnnnnnnnnnnnnnnnnnnnnnnnnnnnnnnnnnnnnnnnnnnnnnnnnnnnnnnnnnnnnnnnnnnnnnnnnnnnnnnnnnnnnnnnnnnnnnnnnnnnnnnnnnnnnnnnnnnnnnnnnnnnnnnnnnnnnnnnnnnnnnnnnnnnnnnnnnnnnnnnnnnnnnnnnnnnnnnnnnnnnnnnnnnnnnnnnnnnnnnnnnnnnnnnnnnnnnnnnnnnnnnnnnnnnnnnnnnnnnnnnnnnnnnnnnnnnnnnnnnnnnnnnnnnnnnnnnnnnnnnnnnnnnnnnnnnnnnnnnnnnnnnnnnnnnnnnnnnnnnnnnnnnnnnnnnnnnnnnnnnnnnnnnnnnnnnnnnnnnnnnnnnnnnnnnnnnnnnnnnnnnnnnnnnnnnnnnnnnnnnnnnnnnnnnnnnnnnnnnnnnnnnnnnnnnnnnnnnnnnnnnnnnnnnnnnnnnnnnnnnnnnnnnnnnnnnnnnnnnnnnnnnnnnnnnnnnnnnnnnnnnnnnnnnnnnnnnnnnnnnnnnnnnnnnnnnnnnnnnnnnnnnnnnnnnnnnnnnnnnnnnnnnnnnnnnnnnnnnnnnnnnnnnnnnnnnnnnnnnnnnnnnnnnnnnnnnnnnnnnnnnnnnnnnnnnnnnnnnnnnnnnnnnnnnnnnnnnnnnnnnnnnnnnnnnnnnnnnnnnnnnnnnnnnnnnnnnnnnnnnnnnnnnnnnnnnnnnnnnnnnnnnnnnnnnnnnnnnnnnnnnnnnnnnnnnnnnnnnnnnnnnnnnnnnnnnnnnnnnnnnnnnnnnnnnnnnnnnnnnnnnnnnnnnnnnnnnnnnnnnnnnnnnnnnnnnnnnnnnnnnnnnnnnnnnnnnnnnnnnnnnnnnnnnnnnnnnnnnnnnnnnnnnnnnnnnnnnnnnnnnnnnnnnnnnnnnnnnnnnnnnnnnnnnnnnnnnnnnnnnnnnnnnnnnnnnnnnnnnnnnnnnnnnnnnnnnnnnnnnnnnnnnnnnnnnnnnnnnnnnnnnnnnnnnnnnnnnnnnnnnnnnnnnnnnnnnnnnnnnnnnnnnnnnnnnnnnnnnnnnnnnnnnnnnnnnnnnnnnnnnnnnnnnnnnnnnnnnnnnnnnnnnnnnnnnnnnnnnnnnnnnnnnnnnnnnnnnnnnnnnnnnnnnnnnnnnnnnnnnnnnnnnnnnnnnnnnnnnnnnnnnnnnnnnnnnnnnnnnnnnnnnnnnnnnnnnnnnnnnnnnnnnnnnnnnnnnnnnnnnnnnnnnnnnnnnnnnnnnnnnnnnnnnnnnnnnnnnnnnnnnnnnnnnnnnnnnnnnnnnnnnnnnnnnnnnnnnnnnnnnnnnnnnnnnnnnnnnnnnnnnnnnnnnnnnnnnnnnnnnnnnnnnnnnnnnnnnnnnnnnnnnnnnnnnnnnnnnnnnnnnnnnnnnnnnnnnnnnnnnnnnnnnnnnnnnnnnnnnnnnnnnnnnnnnnnnnnnnnnnnnnnnnnnnnnnnnnnnnnnnnnnnnnnnnnnnnnnnnnnnnnnnnnnnnnnnnnnnnnnnnnnnnnnnnnnnnnnnnnnnnnnnnnnnnnnnnnnnnnnnnnnnnnnnnnnnnnnnnnnnnnnnnnnnnnnnnnnnnnnnnnnnnnnnnnnnnnnnnnnnnnnnnnnnnnnnnnnnnnnnnnnnnnnnnnnnnnnnnnnnnnnnnnnnnnnnnnnnnnnnnnnnnnnnnnnnnnnnnnnnnnnnnnnnnnnnnnnnnnnnnnnnnnnnnnnnnnnnnnnnnnnnnnnnnnnnnnnnnnnnnnnnnnnnnnnnnnnnnnnnnnnnnnnnnnnnnnnnnnnnnnnnnnnnnnnnnnnnnnnnnnnnnnnnnnnnnnnnnnnnnnnnnnnnnnnnnnnnnnnnnnnnnnnnnnnnnnnnnnnnnnnnnnnnnnnnnnnnnnnnnnnnnnnnnnnnnnnnnnnnnnnnnnnnnnnnnnnnnnnnnnnnnnnnnnnnnnnnnnnnnnnnnnnnnnnnnnnnnnnnnnnnnnnnnnnnnnnnnnnnnnnnnnnnnnnnnnnnnnnnnnnnnnnnnnnnnnnnnnnnnnnnnnnnnnnnnnnnnnnnnnnnnnnnnnnnnnnnnnnnnnnnnnnnnnnnnnnnnnnnnnnnnnnnnnnnnnnnnnnnnnnnnnnnnnnnnnnnnnnnnnnnnnnnnnnnnnnnnnnnnnnnnnnnnnnnnnnnnnnnnnnnnnnnnnnnnnnnnnnnnnnnnnnnnnnnnnnnnnnnnnnnnnnnnnnnnnnnnnnnnnnnnnnnnnnnnnnnnnnnnnnnnnnnnnnnnnnnnnnnnnnnnnnnnnnnnnnnnnnnnnnnnnnnnnnnnnnnnnnnnnnnnnnnnnnnnnnnnnnnnnnnnnnnnnnnnnnnnnnnnnnnnnnnnnnnnnnnnnnnnnnnnnnnnnnnnnnnnnnnnnnnnnnnnnnnnnnnnnnnnnnnnnnnnnnnnnnnnnnnnnnnnnnnnnnnnnnnnnnnnnnnnnnnnnnnnnnnnnnnnnnnnnnnnnnnnnnnnnnnnnnnnnnnnnnnnnnnnnnnnnnnnnnnnnnnnnnnnnnnnnnnnnnnnnnnnnnnnnnnnnnnnnnnnnnnnnnnnnnnnnnnnnnnnnnnnnnnnnnnnnnnnnnnnnnnnnnnnnnnnnnnnnnnnnnnnnnnnnnnnnnnnnnnnnnnnnnnnnnnnnnnnnnnnnnnnnnnnnnnnnnnnnnnnnnnnnnnnnnnnnnnnnnnnnnnnnnnnnnnnnnnnnnnnnnnnnnnnnnnnnnnnnnnnnnnnnnnnnnnnnnnnnnnnnnnnnnnnnnnnnnnnnnnnnnnnnnnnnnnnnnnnnnnnnnnnnnnnnnnnnnnnnnnnnnnnnnnnnnnnnnnnnnnnnnnnnnnnnnnnnnnnnnnnnnnnnnnnnnnnnnnnnnnnnnnnnnnnnnnnnnnnnnnnnnnnnnnnnnnnnnnnnnnnnnnnnnnnnnnnnnnnnnnnnnnnnnnnnnnnnnnnnnnnnnnnnnnnnnnnnnnnnnnnnnnnnnnnnnnnnnnnnnnnnnnnnnnnnnnnnnnnnnnnnnnnnnnnnnnnnnnnnnnnnnnnnnnnnnnnnnnnnnnnnnnnnnnnnnnnnnnnnnnnnnnnnnnnnnnnnnnnnnnnnnnnnnnnnnnnnnnnnnnnnnnnnnnnnnnnnnnnnnnnnnnnnnnnnnnnnnnnnnnnnnnnnnnnnnnnnnnnnnnnnnnnnnnnnnnnnnnnnnnnnnnnnnnnnnnnnnnnnnnnnnnnnnnnnnnnnnnnnnnnnnnnnnnnnnnnnnnnnnnnnnnnnnnnnnnnnnnnnnnnnnnnnnnnnnnnnnnnnnnnnnnnnnnnnnnnnnnnnnnnnnnnnnnnnnnnnnnnnnnnnnnnnnnnnnnnnnnnnnnnnnnnnnnnnnnnnnnnnnnnnnnnnnnnnnnnnnnnnnnnnnnnnnnnnnnnnnnnnnnnnnnnnnnnnnnnnnnnnnnnnnnnnnnnnnnnnnnnnnnnnnnnnnnnnnnnnnnnnnnnnnnnnnnnnnnnnnnnnnnnnnnnnnnnnnnnnnnnnnnnnnnnnnnnnnnnnnnnnnnnnnnnnnnnnnnnnnnnnnnnnnnnnnnnnnnnnnnnnnnnnnnnnnnnnnnnnnnnnnnnnnnnnnnnnnnnnnnnnnnnnnnnnnnnnnnnnnnnnnnnnnnnnnnnnnnnnnnnnnnnnnnnnnnnnnnnnnnnnnnnnnnnnnnnnnnnnnnnnnnnnnnnnnnnnnnnnnnnnnnnnnnnnnnnnnnnnnnnnnnnnnnnnnnnnnnnnnnnnnnnnnnnnnnnnnnnnnnnnnnnnnnnnnnnnnnnnnnnnnnnnnnnnnnnnnnnnnnnnnnnnnnnnnnnnnnnnnnnnnnnnnnnnnnnnnnnnnnnnnnnnnnnnnnnnnnnnnnnnnnnnnnnnnnnnnnnnnnnnnnnnnnnnnnnnnnnnnnnnnnnnnnnnnnnnnnnnnnnnnnnnnnnnnnnnnnnnnnnnnnnnnnnnnnnnnnnnnnnnnnnnnnnnnnnnnnnnnnnnnnnnnnnnnnnnnnnnnnnnnnnnnnnnnnnnnnnnnnnnnnnnnnnnnnnnnnnnnnnnnnnnnnnnnnnnnnnnnnnnnnnnnnnnnnnnnnnnnnnnnnnnnnnnnnnnnnnnnnnnnnnnnnnnnnnnnnnnnnnnnnnnnnnnnnnnnnnnnnnnnnnnnnnnnnnnnnnnnnnnnnnnnnnnnnnnnnnnnnnnnnnnnnnnnnnnnnnnnnnnnnnnnnnnnnnnnnnnnnnnnnnnnnnnnnnnnnnnnnnnnnnnnnnnnnnnnnnnnnnnnnnnnnnnnnnnnnnnnnnnnnnnnnnnnnnnnnnnnnnnnnnnnnnnnnnnnnnnnnnnnnnnnnnnnnnnnnnnnnnnnnnnnnnnnnnnnnnnnnnnnnnnnnnnnnnnnnnnnnnnnnnnnnnnnnnnnnnnnnnnnnnnnnnnnnnnnnnnnnnnnnnnnnnnnnnnnnnnnnnnnnnnnnnnnnnnnnnnnnnnnnnnnnnnnnnnnnnnnnnnnnnnnnnnnnnnnnnnnnnnnnnnnnnnnnnnnnnnnnnnnnnnnnnnnnnnnnnnnnnnnnnnnnnnnnnnnnnnnnnnnnnnnnnnnnnnnnnnnnnnnnnnnnnnnnnnnnnnnnnnnnnnnnnnnnnnnnnnnnnnnnnnnnnnnnnnnnnnnnnnnnnnnnnnnnnnnnnnnnnnnnnnnnnnnnnnnnnnnnnnnnnnnnnnnnnnnnnnnnnnnnnnnnnnnnnnnnnnnnnnnnnnnnnnnnnnnnnnnnnnnnnnnnnnnnnnnnnnnnnnnnnnnnnnnnnnnnnnnnnnnnnnnnnnnnnnnnnnnnnnnnnnnnnnnnnnnnnnnnnnnnnnnnnnnnnnnnnnnnnnnnnnnnnnnnnnnnnnnnnnnnnnnnnnnnnnnnnnnnnnnnnnnnnnnnnnnnnnnnnnnnnnnnnnnnnnnnnnnnnnnnnnnnnnnnnnnnnnnnnnnnnnnnnnnnnnnnnnnnnnnnnnnnnnnnnnnnnnnnnnnnnnnnnnnnnnnnnnnnnnnnnnnnnnnnnnnnnnnnnnnnnnnnnnnnnnnnnnnnnnnnnnnnnnnnnnnnnnnnnnnnnnnnnnnnnnnnnnnnnnnnnnnnnnnnnnnnnnnnnnnnnnnnnnnnnnnnnnnnnnnnnnnnnnnnnnnnnnnnnnnnnnnnnnnnnnnnnnnnnnnnnnnnnnnnnnnnnnnnnnnnnnnnnnnnnnnnnnnnnnnnnnnnnnnnnnnnnnnnnnnnnnnnnnnnnnnnnnnnnnnnnnnnnnnnnnnnnnnnnnnnnnnnnnnnnnnnnnnnnnnnnnnnnnnnnnnnnnnnnnnnnnnnnnnnnnnnnnnnnnnnnnnnnnnnnnnnnnnnnnnnnnnnnnnnnnnnnnnnnnnnnnnnnnnnnnnnnnnnnnnnnnnnnnnnnnnnnnnnnnnnnnnnnnnnnnnnnnnnnnnnnnnnnnnnnnnnnnnnnnnnnnnnnnnnnnnnnnnnnnnnnnnnnnnnnnnnnnnnnnnnnnnnnnnnnnnnnnnnnnnnnnnnnnnnnnnnnnnnnnnnnnnnnnnnnnnnnnnnnnnnnnnnnnnnnnnnnnnnnnnnnnnnnnnnnnnnnnnnnnnnnnnnnnnnnnnnnnnnnnnnnnnnnnnnnnnnnnnnnnnnnnnnnnnnnnnnnnnnnnnnnnnnnnnnnnnnnnnnnnnnnnnnnnnnnnnnnnnnnnnnnnnnnnnnnnnnnnnnnnnnnnnnnnnnnnnnnnnnnnnnnnnnnnnnnnnnnnnnnnnnnnnnnnnnnnnnnnnnnnnnnnnnnnnnnnnnnnnnnnnnnnnnnnnnnnnnnnnnnnnnnnnnnnnnnnnnnnnnnnnnnnnnnnnnnnnnnnnnnnnnnnnnnnnnnnnnnnnnnnnnnnnnnnnnnnnnnnnnnnnnnnnnnnnnnnnnnnnnnnnnnnnnnnnnnnnnnnnnnnnnnnnnnnnnnnnnnnnnnnnnnnnnttgttttgtttgttttgattactaagttgtccatcagattgtcatgttttaggactattgtcagttttagagagttagagaatttattaagatttttctgccacaaaatacactcgccttaccaccgtttttccgtcagacttctttgcctccacggccgaatttcaatattactagggagatataactacggcccacatacgatccaccaactgttgttggtattgaacttccttttcgtctccttgatgctttctctaaatgtaggggctctgtggaaggtaatatatcgccgcgactgtgattgggaagagagctttgtcttacagcacagtcagcttcaagggtgagtggtcgggcggtggaggagaatacctcacggcgggaatcttagtccatcgaattatgtaagtttcttaaacagggggttcaacttttggaaatctatctggttaattacggcgtcatcactgtcatctgcctgcaataaccactagtgtggtaggtaattgattagaatgaaggtatagtgtagtggatatgtcattttcgtaataaatttatccattcgacaggtagacagtatatcgtaagagaattcgtaagttcaataagttttgtaattatatatatacattcgatatgtgagtatcaactgcttttatatattttgaatcacagtttcaacttcatggttgattgtcgtttattaatttccacttaaaatgaacacattcattatacataattttagtcaaataatttgaatatatgtcattatttgacatttacgtggttaaaaaataaaaacgtagtatgaaaagtccaagcgaccgaagtgcgtctttgtaagcgggcccgcccgcgcgtgcgcggaggttttgccatctcacccacacatatcaatttacaccgacccaattgcgtcagtcatttctagttcgcttgagaaccttaccaggcttcacagtttcaaagagcggcaatggtctctctgcagagttgctaatcttctctagcaccgaaacacagttttaatctcacttttgctattggcgacgctgtcttcgactgtaatgtgggtcttgtaaacggcggacctgtgaattactgtatgcggttagttttgcctttcttggtttagcgcctcaatacgctgtcacgtaacccgtaacctacgttgagtgccctctgactaaaatatgtattcgtctcccctacctttctctcacctttccatttttctgcctctctatcttgcactcatcgcctccgcctttcttttactctggcccccaccgactactgcacattt

SEQ ID NO: 15 - DNA, 249195 bp, Penicillium roqueforti
  misc_feature (178562)..(178785): n is a, c, g, or t
  misc_feature (245359)..(246548): n is a, c, g, or t
attttatatgtacttaggctctatgatttcctatatagactctagtccgccagcggctgtaatatcgtccaacgcgagcttccgtagctcggcggaaagggaattcccaactttgcgctgttgtagaatattgagtaatcggccgcgatattgtcctcttcgccaaggtatggataagaggtagagagatcttgccttcatttagatcctctgcgaagccttttttctttgtatactgtcaatttgggtaagcgcagtcaaaaaaaacagaatcaagagttaaaaaaccctgtcatagaaagaaaaggttttcatcatacatccgcatctaggaggtttagatagtcatcacggacttggaagaacctgcctacggccttcatgaagggtgagacatcgaggtctttgttcactgttgcctcggagcgcatcaattcggccacaagaacaaaaaaaccgccggtttctgagatagaataatgatcagcatttaagtgagcgttggggagggtaattgatcgaacatactaccatcaatcatagtaaaatattcctcctctgtcggaaccaccgtctgatttgtccagtgtagatccattccctggccaatgtggccttctatcagtctggttgtgaagatagcagcagcattgggtgacagtttcatcgcagcccttgaggctctcagcagtagaaggtttgcagaattgattgtctggccaatgccaaaaaccaaatgcgtagctgggaacccacgtcttaatggtgagttatcctgtatgtcatcaaccctagttcatatttgtcaatggcccgggatattgacacagcgaagaatcagagaaaatcatacattagggaggaactgtgtagcaaatcggcaatctcttgaatgattataacagatcgttccgggacttgataccagacgtcaagaccatcaattgctgcattcctcaccccctttgacggtagagacttgaggtagacatagggttccaatgcaatctagattctgcttagtacatctccagtatctggaggctgtgggcttacttcttcaaattccgagatatggaggggggtatcgtctctttgattctcgaattctgataacgcagggctgatgggtgcattgctagcttcaccattcgtgctagatcctaggatgttcggggaatcaagggtttcgaatcccacaaaattatccctttttgcaattatcgtaagcgatgtgattggtttgcttaggctgctgaaaggatgagaggctttctttttctgactcacaacccgcaaacccggatacgcatcttcaacgtcatcgtggtatcgtgcagtggtcatgctccacgcaaagttcccagcagtcacaatgtccagtaactcaaaccatttgattatgctttttgtcacgtttccacgagcgaagtaatcggccttgagctggcagtacctttcctcgcgagcaataatctcactccggagcatcttcttagccgtggtcggatcgatgttatgccacttcatgaaaagaaagactgcgctaacaatctggccggtgcttccgttggattcgtagttcttgtgctctttttcccaggaaaagtagtcattcaccagaacccaagcatcatatgcggcacttgtaatgctggaagtttgtgcggtctcttcagccgtgaggtaaaaatccatggaaaaacacatcaaggccatggtccacctattcagcgcagttagctgagaatcctcactagggctcgctcgaaacatgatatcttacgggcatcctgcatcaacagcgcggaatatgaaataatcttccaatgtttgaaagtcaagatctctgatatccacaaacacgtctgacatctccttccagagacggagaataacctggccctgttctaagtcgaattctagaagctccgtagccattttagcttgcatttgtctcttcaaattgcttctcgtagatagttttccatccccatactcctcgaggccttctgtgagttgcttgtttgctttgtagagctgcaaaatgtgtcttgtcagaagaggcaaagataataaatgtatcaaaagtaaatactcacttctgactcgcgtttctcttcggcatattcaatgactgtaatgtttagttggtttattgggccaatttgagcatgacgggggccacttacggtcatcatgcacgtacgtatacttaataatgtatgaaatcaaagcaagccgcttaggaattgcttcaactgcatatagagctgtaaagttaccaacggtcgggttgatacaaccaacagcgtagcttttgttgcttccactccgaaccgctgcagcataagcagccccttaagaacccagaagatccatctgacattgccaacaccctgaatcggcgagatgagtatcacggtggatacaaggagtgaacttgcaaaagtactcttctctcttatatgcttctcggggaactggaagggaatcaggtacaaagtgtctcgtaggatcctgcctccgcggcaatatgattgtcttactcttaaaggatagagaaatcggacgtgatgttttcagtcgggatgatgggaatgacttggaagacatttcatgaggaagtatcatctattaaatatccagttgtgtgggatagaaactgaaaaatctaataataaaaatgaggagatataatgcttatatgtcattagctcgaactattttccaaaactctgtgtctatatgaatgtgatctatatgaatgggatgttcctatgattttaaatcagatatttatgaccatatatagtagtactactgtatataattccaattattgtgctgtacgcatataatcaaagtttagtagaattatcgtgaggctaatatatacgaaaaaccatgtgatcaaatatataatgtggcccacatttccattttaggataaaacctactaatctagtatacagcttgagtctgatcatctggggctatcgattcaaatgagcatgaagtttcaatccctaaaaagaagttaggatgtttctttctattctaatagtaaaatctttgattgacagtcgatatcgatattcgatatcgatatttttccttaaaaaaagcaattctttatggtttgatgttgtttacaactgtacatgtcacctatgaatttgatagtggctgcctacgatagtctaccctataaagatttacccacttccattttgtttttcttggtgtataaatagcgtggtatataattcaacatacattacacaagtacctgagtacgtcggtatgttaataccgagaggttgtataatatagattgcatccacaggaaatgctatcatgtaatggcgattgttccgccaagaaataaactttttagcgattttttaacaagggaggatatttaaatgtgggggacagtttaacctaatgaactctttgataacctaatcgatcggtatttatttcttgaaggaatggcacttctagataacatgggggtttcttgctacctgacattgattatgtctgccagtctggtaagttgaggctggttctctttaaagattaccttatgtatgcctgttgactgacctcgggatgtatttggtaagttgtggttatcctctaaagctgtttataatatatggtttcatccattgaggaatttccccggtccatggtacaccaaagtatctaggatttggtacgtcttgcgggtcctccagggatgccacaaatatgagattaaaagactccacgatgaatatggcctggtcgtgaggattgtaccagatgaactctcatatattgatcctagggcttggaatggaatttatggtgaaaaaccctcttccttatctttctaaggtcatgaaaatgcactaataaactacaatttgaaggtagcgttgtctataaccatggattatatccgatggagaaagatggggatttttttgcaacagcctttggagactcggaaactcttgttaggatatgctaccctgatttatttatcctaatatttctctgactaatggaaactaggtgggcgctaagagtgcggagtataaagtttaaaagaacaatgctgtccggggcttttcatatgggcaactgcttcagaaagaggatatgatattatctcacgtggaatcttttacccacaacctcaaaatttatctcgaaacgaaaaacgaggatatcatcgatatcgatgcctagattgggaacttgatactcgatatctatgtgaagcttaccataggccacgatttctatactatcgataaggggccttcatcccacaccttggtgagcactatatataagatagcgaaggccttgcagtatattacccaacttctttaccttcctctatccctatcgccccttttccgcttatggatatttcgtcgtgatatctttactatattcagcagacttcctcctttaggaacagcaattactgagcgcctggagcggatgggtaccactgataaccgtgtggacttgggtaagaaagctgtcctgattcctggctctaacttctgatgtaatactcaccgtttcaaagtatactatatagagaatgattaagaggacggcataattgattccgatacgataaaaaggaacgccttgattgtgattcttagcggaattgagacactccctgattatattggttctgttatttactatatgctccaaagtcccgagcattttgctcggcttaggaaagagatacatactgtatttacagtctccgaggacattttagcggaagcagttcaaaatcttaaatttttgaaagcgtgtatgaataagagccttcgcatggctctgccatttataggcaccctacctcgtcgagttcctgcttgtggtgtgtatatttgcggccagtttgtaaagggtggtactactgttggcattcacaattggtctataatgtatagtgggaggttttggaaaagtcctgaggttttctgcccagatagatggatggacgaccctaaatatgaggacgatacgcgtgaggccttctatccgtttggagttgggcctcgaatatgtgttgccaggaagtgggtctactacagcccccgaaaacatatatgagattgctgatcagataccaaatccagtctcgttattattaaagccagtcttatcctcgctcggatcctgttcgactttgatatggagttagagctttccagcagccatgattggccgaagagaaatggtcacctggttccgaacaagcgtccgctatttataagagtcaaagcggacacgggtgaaggaatctagtagatgtttgacccttcctgctaccaaatagctcagagttgcctcggaattttctactatgaagtaaatagaaggatgcttatttagtcgaaaatcggtgaggtgcctctgtttaaatgtacaatccgcaaccaagatatttgttctccacgtctttttcttcagggtcccatagcgaacgtggcgatgttgcaccgcttagcttataaaaggtaatgacgaggtggccttgatgatacgattccaagtatgcagcatataaagattgataaatggtgtatccattgccaatctcttcttattgattcctatagagttctattatgagggcatatcaaactcgctatagaaaaccattggaaaaaaaccattagcagagaaatatcaggcttagatggagtctgaggacactgtgctttatgcagaacacgtccgattcagttaccccctgggcccctgagacctctatggtatggtggaatacgaatattgaatccaacactatgcctgatgtacattctgggtaagcgttttaggctgatcgctgcttatctcaatgaagaacatagaaatatgagacatcagcaagaaaagacctatgcatacctattgcatacctgcgcaagcaacttatcattttcgtgaaacaagcggtgtggatcctcagccagccactcctgaggtctggggtgatccccatggatctaccgaaataaagtgggcgggtggagtaaatagaaatttcggttggcgggcgaaaccgtaaggtgtagctacgaatgcaagatagagtggatgagataatatgaagaggtgtgggaatgaaaggctattgtacagggtttcctgggtgggatatcacatccaaagcccgacccgcatgttaccaccaatgaagcaaagtatataacgcatagtaattcgaatgcgtaactagttagtgaagagggatatacatcattattctcacttctggttaatcacacccttcttgcgtagtctgcgcctccatcatatctgttaaattacatcatacttttcgtactgcaaatttctgtcaatgatcaatattctcatggtcactacgattagagtgggtgacattcggtcggttccccgtaccatatcaaaaatgttcaattatctatcgtaataactagcgcagtaggacagctgaaattaaaatgggggatatttacctatcagaattcagcttaatcggaattgatttaggctctgcagtctagtcaacaaattactgtcagaagtaatggattttgataggcggggggacgggagcacgcagaatggagaatgaggaagcgaagaaaggcagtgaggccgagtgtataaagagaaatcttaagaagagaatggacaatatcgagaaattttagttcgtcctaaatatactcaataatcgatatattgctcggggacccctaaaccccaaaccaatgaggaaatttgttttctctggtgtctacctttcatcgcgcttttttcgagaagcaatgagatagtgtcttgaagagctttaaggagagtttcagaaaacgtcaaattggaaatatactgaataaggtctatcggcagataaagagtaacaatcttccgtcctgcaatgaggttttgttgggtggccggaaggcggtcacccatgtaggtacagatcaccagatagttccgctctctcttcctctctctcttcccctcctgtccatgagaacttagcagaatcaataccagttgtttcctctttacagacacaaagtagtacgatctccattaggttttcctatccttcattgaccgcaaggggctgctaatatacccttggatgctgaaagtttttgagccacgagccaaattttccttaaagtctaaactccctagtgggcttgcaggccgctgctgtcatattccttcggctactacggaacaaattggttctgtcagcaataggctagggtacagtgacgaggagcttgatttcctctgggaagaaagcggcactagtggcaaagattgggatattatctttgacaaatttaaaaagagagtcccctaccagaaatgttcttctcgcgaagaatagaccgggattttgtagtggagcgatatgttcaaaatcaaagcagtgtcaggacctttgggcaatatcattcatgatcccggaaacattaataggttgagtggaaattttttcatggaagcggtacggaaattcgccctcgatacgatcctctgggtttagcgattcggctccgttggcggcgtcatcgacgtttgtaaacctcaagttcgatggaaccgaatcttgtgaaacagagacagggtatctagcgggatgatcggttcttcggaacttctctctccctgattccatccccgaaactaggccatgatagagaatcacttaataaaagttcgcacggagtaggttaagtcgttaaatgaagtcagctcacagttgtaggaattttgcaattgattgaaccatagatctaggtcttgtactagatcgagcagatgtatcttactctgtaaaatcgtgatatgtatactgtctgacattggtatgttcgcaaaacgttgtatttcattatagcggaatacgaaggtgtatagttagttaacggccaacagtcggatgcctgattttaatggttttacagcgtaattaggactagctcctaccagctttaggctgacagaaaattaaaatacctgaattaccatgacagatctgctggcttgaaacttaaaatatgaagctattcatacccaccacagtcctgtactttcccggagaaaagctgacagcgctactgaaaccaaggcccaaaacgtctggaaagccaaccctagattttaatataaagtccctattactaccggccgtacaaacttcaaactctctgtatcctctggctccagcgtgccgaagtgcccttggaggggttgcgctttcaacgactgtaataggaggcggtgatccgaatgtaggagacgcgttgaggtaacttcaatgtgaacttacaaaatatggtattgagcggtgtgaaaggcggtctaaaactggtaactaagagctaactagtcttaattaggtcataaaaccattaaaatcaggcatccggctgttggccgctatacacctgcgtagcggaatcttcgaaattgatctatatgcaacccaacaatggcggaacttgcgctgtaactatatgcttggcagataattttcttttaggcgttcgcaaatgatcttttaaaaaactatatgcttgagaccagcatataaggctttcgagaagaaactattaatcccataattgaaaatgtcgaatttcgtacagcgtaatttaccactagaccataacaaaaaccaaggttcctgtttagggcctagaggggccatatcccattcttgacagaaaacattgatgtcggaaggaattgcagacaagatgtgctgataaatttcctcgggttcgtcggataaacttcatgatccagctgttggtttgtgaattctagagcaatcgacctgagtgcaagaagtctcaagagcttgtcctcgggactgagtattcgatctccttctacgcaccttatgtgctcaaatcgaaggtcatcacagtttcgcttgcgagatagtagctggcttaggaacttctggccagcttcctatacccagcttgctgataactttattcgtttcaacaagtcagggatatgatctggaggtggtttggattccgcggatatatcgctacgccgctaccggaggcgcctttagtcggtatcaaccgggcggttagagcggaaccatacaggctagcgaaataatgtgtttgtagagataggatgccttggttgccaagtgctgtcgtttcagcaatttggaaaggttgagttgaatgtagagatagcacgcttggtaagtccgtaagactcgcttgaaagatatcgacggtatgaggtagtgctgaagacgttagtctaagcgaagcttaccaagctgcgtcaagtactcagtggtctgttttgcgacgcgttctttatcgtccgatatcatctttagccaaatttcactgaatggttaacctcgaattcgtctagtaagaagaaaacttgccccattgtcttcttgccattcttcaatgatttggagtataggcattaaggtccttaacgccagaaacgtgatattggggacttcgaaatttggtagctcggtagaccgtcctttcaggatcaaattagagtctaaagaccatacccctcgattgctgaccccgtagaggaggttcacgtcactctggtaacgacacgcgtcttgacgtgtttgggactagctacacgccgaagaggtattttcggtggtcatttggtaaagaatcgattttttttttaaagggatgtcggattttggagtcaggagcatcaaaggctcttataatgagggccggggcgatcggcgcgacaaagtcatggtaaaacatgtatcatataggataatcattgaaccgtagaatgtcctcgccgatcgagtcgacacaaaaggccaacgagttgttgcctgggggtactggggcaccggtcgcatcgggccagctgcattgtcccgtgacagttcgttttccgtcgcaggcggtggaagatcccttggatgttaggatcaattttgtgtcgctcgttttattgctgatactactcccgacaagcgatggaggaaacaatcgtcgagctgtggcgtcagcttgaggaagagagacaagcacgagaataagaacggagggcgcgagcgagaagagccagagcagcccaacacactatttcgccttctcgatcgccgccaccactctttatctcaagcggttcgagttgagacggatgcgaccctcacggcccagggcgatgcgtctgcccctattaaccgactctatcccaaacgcattgttccttggcttgacttcccccgactccaagagcaactttgcgtcacatgccaactacagaaatccatttctttgaactgaaattccaggcaggggatcagcatttgaccctcgccgttaataatacaacttagcagagcgagcacttccagggcacgattccagcaatattttcagagagcgtgtcttgggcctatctacgttctagacccatgagataatttatcgctatctgtgccccgcgtacgcaatagcccatactaacagacatctcatcaggaatgtcgacgaactgtccgatcatggccatattcttcattccgtctggaatgactgcaggcctgtcgtaatagtcccgccgcaacagaggcgccgacttacgaggcatcacacaggggatggtgatcgaatcctggagtatctcgctcgggaattggaggtggtgcaaaatctcagtcataatttccttgccggagcacttgagcattggcttcctgacatggtccccttctttctctgggaatgccgcgtagccccagaacacctgcacgtcgaccggctggtcagaaaacatgggctgttgcggcaggtagaggtttagcaaccagttgctgttttgaagggtgacaaatgtcccagtgcccggctcgtcacctgtcagctggatgaaactctcaaagaatcgcgtatttttgagcgtcacagtgaatgactcttgtcgggattgacacatacgagtgcaaaagttatatgcgttgccaaatttcgaatcttttgtcgacagctctagccacaagagccagttctcgtccaggtcctgatcgatctctatcaactcaagtgatggtggggagttgttcgtcccggtagttgcgccagacatcactgagcctgccgatacaacgacaatatcctgctgcccgacttcaatccttctctccggttcattgtccttgacagcgcagatggtggacacctgttggtgtgatggatcgataccgatatccgtcacagtcgtgcgaaaacgaaagtcaacgccacgagacaccaggaaatgagctataggttcgataatagcctcgtgggggttgtagcgaccgacgtcgagctggcgcggatgatctaatttgtgggtatctttcatgaacccctgtacatatcgacggaattccacgaggctgtgccatggctggaaaccgaacctattatcagagacatcgtcagtttagtgattggtagattcttccatctatcaacgatacatacgttgtcgctaataacagccagtacttgctctcgaaaaagcctttgtggaaataatcactaatacgagatcgcgatagactcttctccgatttgaaacccagcgtgaccagatccatgtggtctcttagtcccagcccaatgtttttaccgttttgccgttccatgcaggagggttttcggacgagaaatcttgtattagggggttttccaggtggttgtgagtggttgaattcaatcatttcgtctaggacggtcttatttgggtccgtcttcgaaggtaccagcgaaaaaagccgctccatgcaactatcattgagggatggcatggaaccagcctggtagtgataaccattgactgaatcgccagaggtgacagagtcccctccagcaaactccaatcgttcgaggatatggatccgtgagggtggaacactagcctcttgaatgagatgtactgcggctgttagagaggcgatcccactgccaaggatccaggcgtccagattgtttggatcccgtttctctgatagttggttcatggcgatgttaggaatggttgcattgaatttgcatgaatgacagaacaaacatgttgcgccaggaaccaatggtttaaaagcccttgatggtccaagatgtgttgttgtagatgatgtcatttagacttgcggagtccttcctcttcgcgctgggatgtgcgttagctgaagcggccgctcagtacccatggtccacggatcgatccaacgttttgaggtggccaggcctcaatgggtgaccttatttcaattgctatcacgaatgtaagttagtcgtgtgcaagtcaatttattgacgtcatactctcaccaccgtcgtttccgtgtcttcagcgtgcgatctcggaacatgctaatatttttcgtaacaatcaaaggtcaatattttttacaattaactaaatcaattgttaatctgattgttcttcgggttgtttggtctaatcagaaagactaatcccttgggtccgaagcccaactgtctctgcacgagggtgagaaatttgaaaatggatcagaataaagagtttttcctaatattgtacatggaccttcaaacaacaagggctcaggagctcgtgggtaggaccaaaggagggaaagagttttattagggataggagagctcccgactgtctacctacctatgtatgaggtcacaccacaacattggcaagatttgtttcaagttcctttgccttctgactcaagtaggcaccatcggccttgacgtgaccagcctggccaaccataccagcaaatataataattgtggccttcaggtctgcaagatgtgtctgtatcaacattcttgcaacccttgttccaaaatcccctgatatttggtactggcctaagcgaacctctgccgaaatgcatccttttccaaacgcgcagatagaaacacgagtccattccaacaaacgtgccaggaccatattgaccaggagaagcgcttgtggatctcgcatgcaatggtgacaattgaagagagagcgcatggatggaataatccgctgcgactgcgtcaggagcatatcgatggcccgtgcctgttctgacgtttgaggaatggcttggagtgtgcaaaggtgattacttagtgttacaaagcaaccgccggatcgggagtgatgacatggattccccagtagacatgatccagaatgatcggaaagaaatgcatggttgggcctatcattgatagtgttgcatcttaatgattttggggagtatgggaaatggaagggaaatcccatttcagttgcttgtgcgttgtggaacactgcctcttcgtagccaaggttgctgcagttcaagatttttcccgatctggttgatatttctttctcacgcggtgttcctattttctgtcaatgccgtgtatttggcgggatgcttgcccatcagaggggggtaataccagtcaaaccaccgggtagttggaaacaatgctatcgacacccagtaatattagtctcctggggaaaatgaaatgcaaggacagatcagtgtacattatcaatggattcacctgggatagtgggtagccaatcctccatgcagccaaggccactttcaggcgaaatcaattcttgaaagggaagagattctggattgaaagtggatgaaccttggctgtcaagtgtaattcctacattggatggcgatggtagtggactaaataccgagtcttcgtcacaggaaggtagtggtgggatcgccggggtgctgtcgctggttggtggcggtgtatggatcgttaggtcatgcttctccattgactctttcccctgccgtagacgctcgattgtctttttattcatactgcctcttggctttcctatctttgctttcaaactatagtgacactccaggttgctgttgagagcggggggtggagaattagcaacatatcggatattccaagaagaaagacttactctccagaacaccgtgcgcagggcaaattccccgtgcagcgtactttggctgcatggcatccatcacaagcactgcgaagccttgaagggttcttttctaattgcttggatttccgtatcttgtcatttggcttgattggggaagttgtaccttcacagccaaccagaacagaagtttgagacatcagatttaacgcagagcaaacaatcgagggaaccagtagcctttacctattgcgaaatttgatgtaataagacgcgatggtggctgctggaggcttataagtctgacgttttcttcacaaaactatcggcaactctacaacggtactcccgccttctggcgtccacgaattgcctaattgggcttagaaatgcctccccaaactgttttcgacccattcaatctcatttgacttgtttcataaccgaaaaaatgggggcccaaagctaatcgatatctatctatggatgctcgggcagggcactagggagatggaaccaacccaattcttatatttacgagtcattcttattgacttttgtgcattcttcaaaccactagttatgtgggagtcggataattcgcttttacggtgagagtgtaccaacccgggcactggcttggctgatgttcaagtaaataagccaatgcccacaaatggatacataatgcaggtatagtgtgtgaatttgaatgaggagtagaagagtggaccagctcccaaggtactagccactgggctttatgggctttatctgccatggcccgtctccaaggtcccaacatcccgcagccaccggactttagtcgactttgactgtctccaaggtcctaacagttcgcagttactggacttcattcgatttaggccgtccccaaggtcctaatagcccgcagccaccatgaagtatagcaacgtcaaatgaaacacaccaaatgaagtccacgtgcgcgagtcaaaaacgggtcaaaacgtggaggctaccccgtccagtcaaagagtgaagttcctgaaagagttgattgggttcgcttatcggcagtccttccatgtaccgaaagtgaagaatatggagacaataaaagctaagcccatgtgctttcgcatcgcttgatgccctctggaagattatttcgctgcacttgagcgaattcgattctactcgtcgcattccagcttctagtgaaatgtcaaataacccaatatggtattttgcctatggctccaacatgctttcggatgtcttcatcacgcgaagaaaaatccagcctctcagatccgaagttgctctggttaaactgcaaaccctctgtttcaacataatgggcgttccgtacaccgatcctgccatggggggcttgcgcccagctgaggaacaagatattccggtatatggcattgcgtacctattgtctcccgacgatatgaggaaggtgatcatcagcgaggggtatgcaaattctagaatcctaggcgcatgactagctgaagtatatctaacaccgtagcagaggtggaatcgcctacaaagccgaggtgtttacagccacgttgcaaaatgatgcgtcagaagtgagtgttcatttattggtgggaagacacagtatctcaagaagctacgagaggcttccatcaagaagatatatggtaaatttatcccattacctcgttgcatggttctggtctaacttaaattcacaggatctgttgattcgaggtgcccgtgaacattctctcccggagtcttaccagaagagacttttgtcacagcaaacattcattccggggcaaagttgtcgattcaaggttggaaaatggctatttgacggattctggcaacggatcgcatactggattgaaaaaggagtttacaaattcaaagatggcgaagggaacgttccaccgtggttcctagtcatcttcgattttctcttatggattatgtggtattaccatgactacgtccacagcgtcatttggggcaggggtgatggattgaataggaaatagaccagtgaaataaggaatagattttgacagaagatcaagattcaaattcacttgcttttctccggtatgagggctctaggcaaatccatctctgcatcaggataagcccctctcacaacacctcggaatttctcgttccacagttgcttcactccatcctgcatgattggtacttgagatttgtttgaagctgattgcacttccacatcgttcaatacacggatcacattaagccctatgatcttttccacatccgatcgggcaatcccacgctccagcattctgcgaaccaaatgaggatatcgagcgacattctcaattccttttacagcattaaacataccgtcatagtcagatccaagcccaacatgatcgtagccaatattttgtccaacatgcataatgtgatcaatgacatggtccatgttcccttgggtgggatcaatgtgagcaagagagggaataaatgtgatcataatcactcccttgttggcttttagtttctcgagaatagcgtcggggacattgcgaggatgtggaacgatggaggatctgtacgcttaaggttcagatgggactttcttttgcagcagtctggctgagaaatcgcttgggataacttacgtcgacgagtgagagaaaatcacaggcgctttggaaatatccaacacttggtgcatcacagattcgcttgtatgggagaggtcaatgatcctaattctggttagctttgtgacttttgcgggagaatatatgttgacaagatcattcttacattccaattctgttcatttccctgactatcaattcgcccttagaagatagtccgtcatgtgctggagatattgcggtctagtcattttagctcctgtcacttgttcgttaattggttatcactcactgcgctatctgcgtacagattattcttattgtgcgctaatgtgacatatcggactccaagtttatgatacaaccgaagaacactggagctgtttgcaatctgatggagcccttcgacgccgattaggctagcaaatttcccatcagtgaacaagcgcatgatatcggaggcacgatcaacgagacccatgtggtctgaatacaaatccaccagtcgatgcactagatcgatttgctgcagtgtatctctcaacgtctctaggtgtgccgcatcgtcggtgaagtcgtctgagtctgggctaagaatatcatcagctgaagacaatattgtaggtcgcggtatccaggctaccagtctatgtaaacactccagaaggcaccaccagatttcccttctctgagtcgcttgaaatcaacatgtcccactaggtccttttccggatccaaccgaatatccagttgattgtcgtaaaacccgcgaatgaggtgtggccagtcgttgtgtccatctaggtggattgtcagccttggggtctcgaacatagcccactagcaggacacacaccaatcagtgggactgaattcaggatatcgatggcctcctccatagacatgctcgtggagactagctataattagccaagcgtcgaatgatcccaaggtccgagagcaacaagtgcatgaaagagattattgatcggcaagagaagcaaatgaaagaaaccagagggagtaatatatttcaaaggatcaaggaaatatttgtcaatagtctccgacaaagtctccggggtcgaagactagactgcttcccaaggtactcactcgtgttatatggtgaggccgaagggattgtcaatgctagaccaaaattcttcatccgtccttttccaaattcatctgattttcgtctgtccagtgggagaatatcagggcccctcacgatgacactgaaaaaatgggtgccaccgttccacctaggtgaacggttgggccctaagaccaatcttcgtctcattcttatgacaacaaccctcgtcaactttttggatctttttcaactctcggcagtgctctttggtctcccagacattgaaaaggcgttaggttttactagcgaggatatcaactgggtgcttattgtttacaacattaccttcgccgctttcctcctcatcggggggcagttaggccagagattcggtctggagaagacattcatttccggagcagcaattcttacggtgtccaatatcatcaacacagcggcgccaaacaaggcggctcttcttgccggtcgggcaatttcagggattggggcgggattgactgtgagttgtcgagcacgttgaaatgctccgttgcactgatctaataagtatttcgacttttctcaaggcaccgaacggacttgctatcctgagtagaacctttcccgatggcgatgctcgaaacaaagcactagcaatctacacagcttgcgccccattaggatctaccattggcactgttgttggttcccttctctcatgtatgtcttacagtccttcctcgccagcaattgaattttctgactggaagatctttagcgtctgacgccggctggagatctatattctggctgtgtctaattctcaccggtctggcacttgtgctagcttgcctatttttaccaccctttgccaagacaaacgacactccaatcgatataatggggagtgtagtctttgtgattggaatcgctctactagtgtatggtctgaatgatagcccaagaagtgggtggtcttcagcacctgtccttgtaggtatcattctaggagtgtgcctattaggtgccttcgtctttattgagatgaaagttgccaacccatgcattccaccatatgtttggaaaagcctccctttcttcctcatgcttgtcgctatctttgcttttggtggcagttttagttcgtggttcttcattactacacaactctgtgtcaatctactaggctacacaccggttctcactgcggtttattttttggtaagtctctcgacctcactccaactccactctgctccaagtcaaatattattgatgcagaagcttccattttgattggtacctggctgacgcgcgtcattgaatagcctggtgcattctcagccattgtcggcggagctctatcggcacccatgatcaagcttaccggggagaagatgactctggtaattgggcttgctattacagcggccggtgctgtagcttgggtatttgcaactcctgaccttgcagggggaactggccatggtgagggatactggtactccattgtggctgcaatcatctttgtctgtggcagccctgttgcgatggttccagcccaaagcattctgcttcgtcaggtcgaagcatccaaccatgctatggctagcgcactgttcaacactgcttaccaagtcggggccagcgttcttctagccggtgccaatgccttcatgaatggaaatcgcaagcccattaatggcatcatgatggtctccatgactggatatcaaaacgcattttggcttcttaccggagtccttggaggtgcagcactcgccatagctgtggcttactggcctcaaaaaacagatcaacagccagaaagccttatggaagaatcgaacccagatgaggagcaacaaataatgaaggctcagtgaatcatatgacgcgctggatcaccacaccagatatcttaatttttacaatcctacttgtcagtcaagtgatttatatctgttcatttttctttcttttttatgttcgccctttatcatattagttgaaaattctttcgtgcatctcaagcggctatctctcgatattttctcgagccactagttcctctgtcatccatacccatttccaatgttccctgtatgtacgatcatttaaatatactatggcggggcttcacatgtgggtagaggtctacgggattacgctattgtgcaacagaagtttaaactaaattgctgatgatatccaacccgggcggtaaattggcaaagtaacaaaggcttgaaagccacaaagggacaatggaggtcttccagcccaaatgaagaaaggcaaatccccggtgtcaacccaataatatcaatttgtaggcgtttgtttagaacgccatgttgcgaagttataatcccttagaacttaggcaagattcttcgattgtcaggaccgaagttctcactttccaagaatcctcaagctttcttcgcccaagcgagatgatagtggtagacatttccaacattgcgaagctcgatctccaattcattgcgaagggtatcaaattcctcgctcttaggttgtcccggcttccctattataatgtaattcgggttagtacctaaatatatggacagttcatgggtttgtgatcaacataccactcagcattcttttcattccatcaagcagatgaagcaaaacaaccacagccctctcgccttgctctggatcctctgatgcggctccaaccttgatgacctgaacactttcttggatgtccacagcaccagcaccctgtaaccattgtactaggaacgatcccgggctcggctggttccctatggctgcccaagcattgaccatgatgtcacggaacttgacgaatgctgcatgctcaggcccctcctgaatcgaaagcatgttcccttcatgcaactcaatccaaccgccgggcttgacacacgagaacaacagcttgacagcctcctgggcagtttgatcggaggcgactgtaagaacaaagcgctgatggaccacatcaaagctgttttgaaagtcggcaggccaagggtcgaatattgagtgaagtgaaagatgtaaattcgaaggccgcaaattctccgggaggaagtgctggggggcgatgtcggtgccataaagtgatgtcgacggggggaccgattgggccagatccatcaaccatgtgccctcggcggtggcggagtccaggatacgaaggtttggctgcttgatatccacagggcaatacagaagctttccattcattgcagtcttcacgagctcatgttgagttcgtaggcgatcgtactcaccctggtggcggggaccccgataggtgtctggagggttggattgtgtcattttgtgctataaaagaagaagatgaaatggcgagagtgaattctatgattagagcgagaaaagagatcgacattgaagacagacgctgctttttaggaactttcatatggtttgaaactcagacacatttcggcgactatcactcaatcgaatgtagagaaaaacatactcgccgaggctagtataagaagcacacgacacatgaaaggcccagaatgagctgtaatcattcaatcgtttcttaattttctcttcgcttgtccagttgcaattgattgccatacgtgatgtcccagccaagcgaagatctatccgtgcggcctcaaatccccgatgacaagctagtcttgtacgtcaaaaaatgtaagaaagtccaacactacggtcaaaatccatggcgaaatccagtcaattgatcttgtatcccttcatttatgatcgggatgagccttggtcttcccacttttacggctactaactgcctacagcgagtcccacatccacggccaacgccgtgaagccgctgatgctcattcaggccctgaaaattcctcacgaacttcatatcatcaattcaaccagcaacgaaacatggtttcactcgatcaacccttataagatggtccccgccatggaggacgtcgaaatttaccaggtcaacggcaagccgcagcggctgaacattttcgatagctctgcatgtctaacttacctggcggagaagtacgaccaagagggactttacaatggcaaagacctctgtgaacgaaccattgtcatgaactggttgatgtcctacactgcggggttgggtgcaaccggcaagatttggcttttgatgaaagcaccgaagccagtggatattggcgaatctctttcggtgttgctgaaatacatttgcaccgagtatcagttcctggaaactcggctgaatgaacctggccagcattacatagctttgcccgacagaccgaccattgcggactttgccatcttgcctcttgcgaatgaaactatcgcaacgtccgccaagctggactttggccaatggccaaaattgaaggagtggagtgagaagatgagagagctaccgccggtcaaggaggctttgaatagaatctctcggattggattatccgatgaagagctcatggagctggatcgcaaagattagaactctattgctgtgttcaattagtactccgtatttaaatctcattgacaaggccaggcgcttgagaatatctttcccttcgttattctgtagtcttgggcctactgcatagggacagaaccaaaaggcagaccaaaaggcagactataaggcagaggaaatttgttttcctgttgggatcacgtgatatgcgtcatgtgctcccgagagctttgcagggtttgcatattctcaaggcctgaggcatgaacgcggcacttttggccaggttgatctgccgagcaaatgcttccggggcttcaatgaggatgcatcctaatccggaccatcgacttctctcaccctactccgtactctctctgacttatgaataccaacctcagatggtttgtcttcgtggccctcaaacatttaaaccatcgacgttcttcatttcccttcgttctccttcatacttttcatctatccacatttgacctttcttcgccatcaaaatagtaaaatggactatacttcaacgtccgctgaagaagggcagaggcatctgctccctagaccaagggagggtattcactttttttagatggaattgtacatagatcagtatgtgtaaagaaatatatcatagtacatttgaatgtcaaaacaaatatataattatatatgatgtgaatctggtctatatcaggatggaaaactaacgatatatacactactggagtatcaaattgaactgcaactaaaagagagtcgaagaaatagatggaaatggacaggaaggacttttgaaaatgtgttgttatggttcttatgctcttaggaaaagatcaaagaactgtatggtcgattgtgaaagaaaattacagtggtgtaggtcgaggttgatcgttcattcccttgtccctccagcacacaggtttcttttttttccctaaaaaaggaatagaaaaagtaagatagagtaaggtcgaacgttcaagacagaaaaggagcattattattttaggaaaagaagataacagaatcaatgtattaatggtatgaagaacagcatataacagaaggcggtgaagatgaaatttggtggggaaagaggcagaataactacctggaagcggtgaacgacacaaacgtcctgggcttgccgttctagagaagatccagtgcgatcaaaacggtgttactttgagaaggcaattgctgaggatgtacgttactaggtgtcactacctgaggcatcaactatagcaatgagtttacagaaagctttgtatgtgaatttaccattttctcattgcttcattttcttggctttaggataacacgcgcattggcaataggaacccacgtatcctgaatgggttgcgagctccatgtcttcttggcatctaaccttggtaagtcaatctcgtaccgatttagtaagtggtagacgaaatgtttcaacatagcctcagcaaagtgttgtccaaggcacctccttgttccaaatccaaatgtgaagaggttgtaacggagctaggcagtatgattagcaaaattacaaagtaagctcgtctatcacttctcacctccgttgaagacagatgctgaaaccgatgtggattgaagcgagaatgatcgttcccccaaaatttctggttgtagttgattgcaagtgtatccacaacaacgctcgtctaatgtccaaattagccttcttatttaggtgtgatctggatagaactaacgtgtgatggaataatatagccaccaatgatttttgttcgtggtgagctttcggggatcgtgaatactggtcacaatcagtcagcaagtatcgactggttcttgaaggaacacctcacttgtaaaagggcgaagcctagctgattccaaaaagcaaaattgcaacagcgtatctttcctaccacagagctctgcgagagacccgggatttgccgaaatttccgcccgaacttgttgctgtatgtcaatatcttcagctaagaagatgataagccagctaagaacgtgtgtggacacgtccaagttggcgaaaagcatttcactaagagtctgaagtatctgtgatccagtcagagtccgtgaaggaagtcagaagatcggtcatctcacctcattcatcgaaatacagcccttttccatcgccatccaagcctcaacgataggtggctggtggttatttgagagagctcttgaatttacaagtctctggttgaaattttgccattggttttggaaactcctcaatcgtcggaatgagtgtggcctcatccactgacacaatccgaagcgatacactccaccggaaagaacattccccataagtgcaaggctttgttgacccagattccacagctcttccttttcattttcagtcaaaggcccatagagatattcggcggtagtcatgaacggaaagcgcgagaaatcactggcggcgtgtacctcaaaggactcagcatcctgtctctcaaggctctgcaagtatccagttgccgcgagctcaatatggctagatattgatgacacggagcgatgaatgaaatggtgcttaaactgagcccgaacttgttcccaacggtccccgttgatgaggcccatacagtcaccaagaagctcatggaataaccatccgccgttgctggacttggatttcaggtgggaaggagagtcgctgtgaaagatcttgacgtcgtcgggtctcgtgattacactgtaaaaggtcaatattctgtcatctctctatatcatcgctgaaacacttgcacttcggggagaacgcccgaccagatgcgatagactggcccatattgacgccattctaggctggcttcacgtccccggagaaatttatcgagacattgcccatcactatatttccatcttgggcctttaatattctgcccatgctcatttcgaaggggatacaacaccgtcgatatctgggatttcaaaaaggtgagttgcaaaaatcggtcattatgtcttagggcagaattctcacaattctatcaataacatgatctttcctttggtaaagcttccatattattactataccgaggaaaaggtaaataatccgagggttgaagaattccatagcgaaagatccgccacgttgagaaggtaattcgcgaaaagtgttgcgatacaattggccatgcgcgatgcccatgggataagtttcgattaggaaagatctccaaatgctatgtgtctagtccgtaaggtactccattaaaaccacacttcaacgaatattctccgaatcgttgattacaagcatcactttgccggggaataaatgatcccgagatcaacgatcggccagtaaaaacaaatagagttttattttcactaccaagaggataaagccctaagctcattttggtgctgatatactatttctagagccgttggatttatcctacattgttgctacaaaggtactcatgttgacgtctggatctcagtctacaaaacacaattcagtcgcccaaaagacaatgagaagcccttgaaaagaaattctaaagatctaggatatttatactttagccctagagttataatatacagcacacatacattagataacttttagagtatcttccattcgactaggtacacagggatggaaagtcttcacggctaatcaacgacaatttccctagtaattcaatgcttgcttcctgggtcagtcttgacattttcaacctcggattgatagtaaatttccggattaaagtaggcagtcacattccattgtccttgatcggaagcccagcaaatgtaggtatgaaatcctagtccatcggcaagatcgcggtgtttactgtgagacaactaatcagtgacttgatctcaaacgcaatcgcatcattcgctcaacttaccatagctttttaaccccatcataataagatcctgtcgctagtgtcctcccacggcgggcaaggtattctgaaagtcctcgggcaatctgctcgtcattttttgcatagtgtcgaacgggcagatatgccttcgacttaggaatcttcgcaccccgttttagctcaaagtagtatagaataccgccggtgcgatgctccttttcacttagaggctgatcgtcaagatactccgcggggtttagatcaaaaaccgagcaccaaagctcccgtagagagtccagctcatcttgtgttttaggggcccttccacctaaacttaacatctcaattacacttttcaaggtcgtgaaaggtgatcgaacgtatattttcaatcgagactgggatgggtccaaacaatcgatggccacgatttcggcgactggtcgcaagttatccgggaatgagtcgagaaattcgttgaagatataaattgaatctagcaacccctttgcgggtgcagggagcttttgaaaagcgtctcgaatgacagaaatctttgtcttctcttcttctaaagctttccacccaggcaagtagtattgtttgacaacaatagacttttccagtagatcaaaggccatgaagctttgtgattgtggaggaagcgatttttgatgttcccttctggccggttcgtttcttgacagcagcaaactttggagatggcggtggagatataaatctaagtcattggtcaaacagagagcatctccaagtaggcgctgactggcggctgtattgataggatcgacttcctgcccagcagacgggccaattggttctaccgaatatcgaaccgtaggggttgctagcgatgtagaccagcaccagcttagctcgactggggtatgatcatccgtcatgaagctcttccagctgtcgggggggccacatcctttaggatgggaacccaatgatcgtgccactgactcccgaaagaattttgtgtgaagcgactcggagtccgaaggatagcccgccataaccaacatgctctggagcatggagccgacatcctctacccataacgatatgtcgtcggcggaatgcttgatggtgtcttcctcagttgtaccctgtcgggatagttaataacttgggccattttcttcacaaaggtacccacacaccttcacgtcttctagtgtccatttccacttaaaaggccaagccctgatataggtcagttctcttcacttcattgctgttgctagttaggacagtcactcacaagaagtttaatagagtgagagccataatattgctctaaagttaccgattttgaaaaggcttctattacccttgggacaacaatcaaaggtaacttatacacaatgaagattcagcaacttcatataatgtcttcggggtattatatcagggctagagatctctgggtggggcatagggtaagccggagtggctcggcgactaagtagcaagtatgtctatcttggtatgtagacctttccgagacggctgagtattcggcccttaagctgttacgaccagaagccctgaatagtgatccacatagtggcaattttgaatcatgtactgtacttcaatcctgtgaagatacacagaagtctttacgacgttgactagtaggaaaatggcgtcaagaatttccgatcggtgcaaaaagcgaaatgctaccatcatacctagtctcataggccagcatgatgctgttctcagcggggacacgactacaattgacctcagtacggcggaaaactgggcgaccaagacaaagttgctgcaaggcctcgaaggggtattcagtggcctgtccgagaatgtatgattgccaaatccccgcaaagtcaccatctttagcatactcacgcctgtcgtcaggatttggcctactcatctggcattggtggttgtcctactacgcgacaactcattgcagacttgattaatgaccgctttcaaccatcaatccccgttgaaaactctcatgtcgtcttagcggcagggggaagcttcgctttgacagcacttattgagcaaatctgcgatcccggagatggaattctcattgcgacaccatactgggccggtctcgacatttccatcagtgttcacgcccatgccacagttgtgcccgtccatataccgttgatcgatttcttcagcacgaatagcatctcacattatgaatcggcgctggaaatatcttcaagtcctatcaaggcagtgctagtctgcaacccccacaacccgttgggtcagtgttacccactggagactttagacgctttgctcgagttttgcaagcgccatgagctgcactatatttcagacgaagtatacgctctctccgcgcaccagccatttccgggcggtttccatccatttgtatcagcacttcaaaggggggatcgtgaaacgagggctcaggttcatgtcatatacagcctcagcaaagatttcggctgcaatggaattcgcatcgtgagtggctctttggtgataccagcgaagcaagaatccatggacattactaaaaagacattaaatgcagggggcgttgattactcaattcaacgatgctgtgcgccttagtagcgctttaagcgttcacagtcaagtgtcctcgctgtcgacggtgctggcatcaaagacgatactgcagcccaccaacatcgacacagcaataagctatggggctcaaagtctgatggggtcctataaagtgattcaatccttcctggagaatgctggaatggagtatataccagtagcctttggtatgtttgtatttagtaggcttggcagagtcagcaacttcgatgcagagagaaagctgctgagatgtttgaagtccagaggcgtatctgtgtcatctgggtcaagttatcatttccaggagcctggttggttccgcatatgctatgcagttcccagtgatcagttggaagagggtctcaggagaattggtcttgggattcaggatttccatcagacattcaacgtggacgaacaatgactgcgccggcttagaatgaacttgaaaattgaagcactagaattacatgagttttctcttccacttaatctaaattatttaaatcggtgcgtttagtggtcctgcaaacagacaaggcagaaaataaatcagtctcacatctttcagagcttcctatgtaatgataaacgagttgaaaactattatacagctgacaaaatcttcatcatcgtctgcgcgatgatagcaacggtttccgaagaaaccatatcttccatatattcaaagtcgcacgtcgtatgttgtttctcttcggtgaactcaatcagaagtgggaactttgcacctgttgttttcaacactccagattccacctcgacgccagggagtgaaagattgtttgcgttggagtcctcctttctgttatacacaaccatcacttggaagatttcgtcttctccagcaatcttccgaatgtctttgagaggaattgagtgcatcagcgcattttgtatcgatgttcgcaccgtttttatcagactttcaaattcgttcaaacttccatcgacgcgcactggtaggcggtcaaggaagcagcccagaaggctttcggtgccaggctcagtgcgatcaacatgcggtatgccaacgatgacatctcgggtcccttgaacatttgcaatcgcttttgcaacgagagcgacatagacttccatagatccaaagaagcttggtgaggttctcagtacaatagactgtgagtttccggcataggttctcgaaccctgcccaagcgattcaaatggagggctgggtaaattcagtaggtggtctcgccagtatggagcatgtttggacagcggtggttggttatacttctgccattgagcccaaatggtgtaatctggagtctcatgtgcaggagaggtgacatctgtttgaggatcactttccagggaccggcgatactcttcctgtacctttttcagaagcaaatttatggatgccttgtcggtaaccgcgtgatgttgcacaataacaagatcgacccacgaaatgttttggttaatcatgattctggtcaatggaccagatgaaagatcgaattttcgattggcgaagctgctgattgggggattggggatcttgtccacgatcatctcggaggaatcatgagattggccacgtacgatttgaccatcgacatctttgaaacagcttttgagaactggttcactggaaataactttctcgatggctttctggaagaattccaggtgaaggtctcctttcagtcgcagatgagaggccacattgaaagcttgaggtgtgggcgacgaggccgacaagtggaaagcctcttcctcgatgttggaggtagctgtatatggtggcttagccgtttgccaggatgaagagaaagaccgctgggtatacaactggtcttcatcagatatatgatcagttatctctttgcacaacgccgacagcacggtgttgaagataaagagccccatcggcagctttgtgttcagtattctactggcaatctgagcagcttttatctgggaaagggaattgcctcccagtgccaaaaactccgactcttcgccaatttcgacagtttcaggaaggccgattgcctcacgccaaacctgggctaccagagactgagtcggcgtcagtggatctgggctttgtcgtttttccagattcaaatgggactgcaatgccttgcggtcaagtttttggtttggcatcgttggtagaacagaaaatgccacgatggtcgaagggcaagcatatctgggaagcttcgttcggagggcctcgtgaagaccagggatattaatattatctggctcaacaaatgcaacaatgttatcgccactaacaagggccaccgcccggcgaatttctgcacagactgtgcgaatggcgttttcaacctcgctcaattcgacccggtagcctcttatcttgacctgattatcatatcgccccaaaaatttcggctccatatcctctgtccacacggcacagtccccagtgcgatacatgcggtgtccaggcacaaatggatccggaatgaagcgagtttgcgaaactgattgcatttcagctccgatgtaaccattagcaacttggatcccactcagacagatctcaccaggcacaccgatgggaactggctgatttcgcgaatcaagtaggtagactccaacgcgaggaatcgttcgccctaatgtgacttcttcatgtggactgagaagcttgaacaagcacccaatcgtgcactcgcatggcccatacgagttgtagacagctttagttcctgcccaacggtctgcaagaacttggggcaccgcttctccggcaaaaagaatggtgtcaatattcggatagtcagaaggttccaaaaccgagaggaaagacggtgtgatcatggtcgcgtcaacccgtgaaagatgggaaaatggatccactggatcggccaagacgagagtagctccatagcagagtgttccaaaaatctccgcctggttgacatcgaatccgggtgaaaacatttgtgagtgtcgtcgacctgggcgagcatccatgcgagcaggtccataagacaaatatgagaccactgctcgatgtgggatttgaacacccttgggaacgcctgtggatccggatgtgaatgtgatgtatgcaaaatcttctcccattgttactgtctcaagtcggggacacatagtcgggaccgtatcccccaggagttgatgcaacaggatattgtgttggaaaatatcttgaaatttagcctgacagttttcgttgggaaagatgcacagtttcaccctagccgacttaaccatgatgcgcattcgctcaatgggtaattttgtatcaagtgggacataaatagccccggatttgatcacagcaatgacggaaatgagccattcaatgccacggtcgctgattatcccaacagcatctccagggcaaacgctggctgcaattgttttggcaacataatttcccaattgatcgagctcccgatatgtgatactgcgagatgtggattcaattgccactgtatctggccacttatcgacaccaatctcaaaactgtccttgagattagatggtcccacatacgggctcataaaagtggatgaattggtagtcagggaaagaagctcagttggctccaacatccttccgcacacctgggatattgtctgacaaagcggatcaagcaatgcgacgaaaatgtttcggaaatgtatgatcatgcgctggattaccggtctagtatacattgtctggttgtataaaccatggaacgtgagacggcctccttctcgacggatgaggacggttaatccaaattctggaacgtcggtacgggagaatttccaagtggagtcttcaaagcctggcaagttgtactctaggaaaagggcggtctggtacaccctggtgtgacttccgggcataatggtctgcaatgcttcttgtgcagaccactggtgagaaccaatgtcaagcagcagggtctgcacgctcgaaaggaagttctgtttgcttttgtgatccaagaggctcattgggaaggggcaagtattcagcgtcgggcccacaagggagtcaatcccgtggagagggaagtcgcggcctgagaacacagttccaaacgtgatctgctcttgtgctgtataagaccgtagtagaagtgcccaagcagcatgtatcattgcagccgatgtaacattctgagttcgacatatctgctcaacttggtctaattcaagctcaacgttgacagtagtaataccaaaacgttgctcttccattccctcattcggcttaggaaggctcaatggcacagcatcggcgaccttggaaaatgcttccttccaaaaagccacttccttatcctgtggaagctgagacctttgtgataagcttcgcgagaactgccagaattgagcaggtgtgttcttcagggttccaccctccagaagcgtttgaacttgttcgatgatgttactcatagaccagccatcaatcaaactatgatgaacaagccatagcaaatgtgcattgctcttgctctcgttcacaagaaggcgaaaagtgttaagaggacggaagacattactataatcgacatgtcccgtgcttttcatcagctcgtcggagtgattcaggagagctaatggtgcatcttcatcagtcacaaaatgtgtttcccagtcatgatgataagtagaaccaactttctgtttcccctcagtgagatcaaaagtcgttctgaatatggaatgctgctctagaactgctttccaggcattgcagaatatgtcactgtattccgtggtggaattccaaggaaaggcgatggtgaccagcatatagctcgccgctgaaaacttaatggaagatcgaatcattcccatctgtgttgtcgtaattggggacgtaacggaggaatcgctatggacggtgtcccacaagggcgccaatggttcctcttccggcgcatcagctttttccaggagctcagacaggaggaccagagaaatcggtgtgaataacccctgaaagtccactgtgtaacctcctttcctgagaatcgacaatagtttgatagcaaggagagagtttccaccaagttcccagaagctgcaagaagtacccactgagccagtagaatgccccaatgcttcggcaaccgcttcttgaagaatttccaaccgagtgccgctcgtggtgttagaggaaaatttggtagaaatgctctcaaaagtgtctcgcaaccttttcaaatcgactttgccgttggaggtgcgatctagctctcggagggcgatgatctgatcaggaacaacgaactcatcatgtgacagagagagttgcagtcgcatctccgtgccgtcaatgctttcaggcgtgacagctgccaccaatctacctttgtacatcagggcggctgccgactgtacctcggggtaggaagtcaagatgggcagaacttccatgtcgatgttaatgagataacctcggtttttcaccatgctatcctcacgtccacagaatatgataccctctggtactctgtgagctcgatcaagggtccggtacaatcgacggcctttccaggtaacaaatctctctgcagtcaatgcttcgtttttgtagtacccagatgccaagccgggtccactaatacagatctctccttcgtcagattcttcgagatgttcgtcaaggatgagcatttttgtttttttcatcggtgttcctagaacaatcggatttccaggtcgcaactcagccatactggtacaaatagtggtttcggttggcccgtagcagttgaagattcgccggttcggactccaccatctctcgatcaaggctgaacttggagattcgccgccgagaaagatattcttggcccgggaataggcttgaggatcccccaatgtaataaggagcgaaggcgttgccggaaggattgtgcaatgtttcgcgtcctccaaaaccctttctggttcagacaggactaaatgacctccatggcagaggcaactgaaaaatacaccccaagcagctgcacaatagagcttggattagcatatcgtgacagagattccctggatttctcggttccacttaccatcaaaagcgaaagagaacaaaagcagaattttgtcgtctcgaccaactcccaagttgaaaggcatgcctctgtcccatccttgcagaacatagttctcaacacatcgacgtggaataacaacacctttcgggctcccggttgtccccgaagtgaagataatataggctggatgttcagaatcaccgggagtgtcgagatctctggtgattgttggaatttcggtctcggtaaatgaggcattgtaagtcaagcgaatggtatctgcttcaatcaccgagtaacgcgcagaattgagtcctgtcttttcagacttgaccacaacttttggctcgacggtttgcagaactgcatcgactctctgttggctccaagagctggcatccataggcaccaggcaggcacccagtcgcatcaacgccaaaatcgatgccacgctctccaaagatcttgagagaaatattgggattgaatctcctgtccggattccatgagaatcaaagagcgcggctaggaataatgaggctttgtcgagcttttcgtaggtcaagcttcggtttccttgagagacagcaatcgagttcggctgaacatcagcatttgccttgattagagcacatatcgaccgaagccggtggtcttcccccgaaacggctggtgactcgggtgtagcgtgtggtgtcatatttgataggcgggtcgatttccagtagacttgcgttgagaaaggctggggtcttagttaaaccctctgtattctggactttgccaaaatattactttgccaacggcgactaagcttcggcggatatttttcccaattagccggccaaggttctccaactaccgcgcgtgagcctttcgttcttttgacaagactccggtttataacaccgttcaaaatctccggcatacagtctcttttcagttcctaaaattatgtatcgtctggcagaaacacatcgaaagtccaacttgtcattcactattctaagtaggcctctaattcgtgtttaaccaaacagcggtttctgtccctgagcctccgccgcaatcgctgtggagactcccatcccagccagggagcccgaaaagatggcatggggaacatttttcatcagtccacagttgtcacctgccgcaaatacacccttgacggtggtttggtagaagggaggggctattttgatatcaccgctaggtgtcagctccaggccaagttgctctgcgaaagaaccgcggggttttgtatcgggagtgtgcgcaaggaatccctccgtcacgctacttccatcttcaaactcgagaagtatactcgccttctcgtcttgtttggacaggctcttgattttgcgagaatcgaccttcatgacagttgaggtcccaaatccttcgctcactgctttagcgagatcctcagagccgtttgtgtagattgtcacgctttgactaagtgttgatacctgtcgggcgacgtgcagggccgaggggggcttggaaagtccgccaatggcaagcacaccagcggaagtgcatcctcgctcttcgtagcctttacagaaaagacagtggaatctagtaggatgatcagtttaaatcggctcactatatctatgggtatgttggttgcatctcacattcccttgccccagcactcagcatagcccgggatatcggggaagacgtcctcgacaccgttgcacagaatgatcttttttccgttccacatgtttccagtctcatcggtcagagagaagcctcctgactcgtcctttcgcacgctagaaacggctttattcttgaactggacatggtcatagttcgagagaatattgttcctggctttctctcgatattccgagggtttaacatgatcaaatccaggaattaaatgcatatagtctgcggggtcatttcgataggttccagcatcgaaaacgattgaattctgttgttgacgagccagagtgagagccgcggtaaggcctgctgggccgctaccaatgatgagcgcgtctgctgaagttgccatttcggatattgagtttgacttggtgatcagaggaatttttcgtttggtgtacgatttttctgtcgagaatgtcagagagagctaacttcgtgctaccggcacatctatcaagtatggtccaagtggcaggattcggaggttaaaagccgacatagtgcccggcggacattaagttacgtaggatagccctcgatagctcccatttgtcaggttcatcgggcctatcgcatatgcgaggaatatctagcgcgcattgcacgtcaccaaggtccccgtaatctatccgaggtaggtaccttggacgacactgacatccaatcaagcatggcgtctctacttgggatttggattttctttgctgttcgctggtggtatatgctgctcacttctatagtatgaccgtgtcgagatttccgtcccgcccttagcgatattcatttgaacgcacctacttgccggtagtgtctagtttgtaatttttaatacgtggagttgtgtggttgaagaaccttggaatattattgacaggatttatcattctcatatatcgtatatgtgttctaaatgctaaagcaagcctttcaagattgcctgtctcacgttgtgctgtaattatctagcttcaggcttttggccccaaacgaaatacacattaagggcgacgtgatgttcgtccatctccttggcaaaccgctcgggcaaagtcttccattcttcttcagtcattccaatcatctcaggcctagatctcgttagatattgttttctttaaagcttccccagtgcgaacttacttggccaccgattggaagaatcccagaaccgacaacatgttgcgttttcctcgcgctccgagttcgggatcggaatttgaggagccagcaaccatttcaattgccttgtatcccacattcacgagtccttcgtcattcaatcgacccgcaagctttgttgaagcgagtgggtctgaaaccaccgtactggtcaatttatggaccgcctggacagccgggcatgactcgatgggcttggaaaccggagtctggaagtccatttcaacgagttgaatccaacctcccggcttcacgcagcgtatcaggttgcgaagtacgagtggaacttcttcggttttaaacaacgggatgacgaatcgttggtggacgaggtcgaaactgtctttccactcggcaggaaactcttcaaccaggttttgcttcacaatctggaattgagagctgtccttgagaggcggatatccttcgggacttcgaggtaccgattgtgagcttatcttatgcaagatatcatgacacaaggttggacttgtaacttacgcgttgtcaaagccaacaaactctgcatctttggggaaaatagacttgacatcctgcatccaataacctagagagtattagcatcatcaattcaacatgcagaaactggtccgataccatctgctgtggcggcgtcgagaactcgtaaacccgaacggttcaagtcaattggtgccaggatcaatccattggcacctcctttcagccactcgtgctggttttgcatccgctcagcttcctccaagttccgtggaaggaaatatctgcttccgacttcttcgacattcttatcaacggcctgggcttggctggagtctgtcatgatgctttgagttttttggttgatatcaagtttcgacaatttgtgacaagtcaagaaaccttttagtatagggagtgtgctaagttatataaatatttcatccatatcttaatatacaccacctattcagggtgctgtgggtacagcctcttagagccattatcgtaacgttcaccaggggatttggagaggccggagagtaatcggacccaaaaaaaagcatcttgaattctccgatatccatcaccttggccaatgtgtacagtggcttccagggagcggagaatattaaaggggtgagagtacccttgaggccaggcccgtagataactaagtcaccgaagctgagtcatcgatatcccttcccgcaaggttcggagcgggggtggggaagccccacttcgatgaatactaaccaatcagaaaggttggtactgccaaggtgctcgttcagaaattgtttgcactgtatgcaccgtttgccctgtttgtatgacgtctccgtgattcatctgagaatttctttcacatggatccaagtcatccgtccaacttcaaccgtctgacttccacgcacacaaacaccaacgggagcactcttcaattcagggaagccatctgcttcaaccgaggaagttttccatgcggtacagaacgaaactccagccagtgcttacgtgcctcgattctcaagttgtggtggagtgaacccgattgtccaaggatataccctacttcttctagggctcctctctcatcgtcgccatctcatctcgctgcaagacacaagtgcttgtgatgctccctcttgaggataaacctatccaagtgattcaaaatttatattatcgaaaatatgcccgccaaatttcaaatgaagatcatggatgcgttcagagactaatgcatcagcgcgggtgtttgttcagatgatatgggaagggcttgctcgacgtgctcgactactactttctttccactatcgatatagagcctctgcttcctgtgatcggaccttcgctcattcgaggtcagctccgagagcttcctgcagcttccacggaagagaatatctcatccagagagagaaagcagaacaaagaataaccttgcagaattactattcctctacctcatatgtgttgcttgcgtattctacctactttgaattcatttctattgcctagtacggcacccaaaatgggcgaaagaaaattcatacaaattatctggagataatgcatgtcccctatggcagaagtttcatttttcatgccgatcaccaccatgcctgccatcaacctatctaggaatgcaatttttgtatatatcctgacgtgcgctgaagtctcgaatggtaacacccaaagtaggttgcttctattaacgatacggtatgctacttttctcaaggctacagctagtttcaattcatctctttttggtcaattcgcgaataaagatcttcgcccccaaggtcttcaactttaagaatgatccacaaggtcccccgaagactaaaagatacctttctaattttttacatttcctttcgtttcttaaattaacaacatcaagtgtggcttgaattttgatatgtctaaatctccagagtgcaagtcccgtcatgctatggatatagatgccaatgagggttgcgacaacaggtattcttaccacaatcgaagaacgtatgttccctcaccccagttggatcttgaatttcctcgctggatcatttatttaacgagtcaatagagcggattttcgagtcttacccctcctagtattggggtttgctagctatcagcttgacagaaccaacattgccagcgcactcacagggaattttgcatcattcatatccgtcaaccaaaacattattaatttcggaaatcaactgatgttcctgggtgttattatacttgagattccatcaaatattattctacacaaggtatgtcgcatcaatttccggatgattccgtctgattgagttgaattagattgggcctcgccaatggatcagtggacaggtctgcatcttcggcataatcgcatgtttgcaaatatttgtgcgcaataagttgggcttcctactcactagaacatttttgggtcttgccgaagctgggtatatccccggtgcaatgtatactctttccacctggtataccaaggaagaattgacaaaacgtatcgccatattcttctttggtatgtttggcggaaccgctatttctccgcttcttggggctgcttttttgaaactggacgggaaaggtggtctctttggctggcaatggatcttcctcggtacgattggggctggtccctcaaacgtcgaaatatgctaacaaatatgtagtcgagggtttattctccgttgcggtatcattcgttctatttttctttcttcctgaacacaagaaagtccctgtgtcgaccgatgaagtgaacatttcggagtctggaggacttcgcctaacggagaaaccattggcccatcctggcaaaacgcacatatcacttagcttggtttggaagacattgacaagctttcaaaaatggccgcattttattgccacgggctgtgtcttcgctacctggagccctctgacaacatataccccaagcattttcatggaactggggtttccccgagttagggcaaatgcattgtgtgcaatcggaagtttgctcactctccccgtgattttggtttttgcgtggatcagcgacaaatcgaataagaggggccttaccgtcatcgttgctatcttcgtgtacttgatcgcgttggtaattctaagaatcgcagttcaccatgtggataaatggggcaagttcggcctctggacaacagtcaatgccctggctgtgggctatcatccaattcacaattcttggatccaaatcaactgcaagagctctgaagaaaggaatataagtgttgcgtgagtaaaacctgtcctattgggcgttcttcggacagatcagctaacactccttcaacatatagaatgtgtaagactactacctctatatcagacaggctttttctttactaactcaatgaagtcgtcatgtcagctacagcggggctcatggcaggaacccagatatttcgggcggacgagtcagctatattgtaagtcctatacttgcggattataccccattcgtaccactaatgctaaatctattaaccttgtagttatccaagaggggtgtcaattatgattggactactagttttgggactgattcttgtatccctacaaatctcgatattctggatcctaaacaggcgtatcaaagcaaaaactggcaacggggtcttgaacattctatagtggccaggatagcggtcttgtcgggtgacattctcacatatatgatcagatgcgatgtttaaaaatttacaattgactagtagttatgcagggataaatcgacttgaaccatctacgtacaagttctatattttggcttctaacctactcatggtttgggagtaattaggtttgtgcaggtaaacgacaacgtctcatattctataacgcaaaaggcatatgtttgatcctcgatatatacaaagaaaataaattatgcacaataatgcaacccagtactccagacctaacatgatatcgtgtcgtgcaaggccatcatgccaaatgcgaatccggaatccaaaagaaaagtcaaatattgcctttctgcttttcttttccaaaaaaaaaaaccttgaccctcatgcgttctctgcgtgtatggttccctctgacttccgaccgtaagggttctcatccgcaatccagtcctggtggcgttcgggaatctcgtagctgctgctcttccagggaacaaccttgttgacatacatccagtcaagctcctcaagtgtacggccctttccttcaataacgaagaaatagacgacgccgatagccacgaaaaggcaaccagcgaagacgtatccataggcaaagtcgatgtccttggtgatgaaagttgtgaaaaagctgatgaggaagttccacagccagttcgttgcagtagctaaggccatacccttggcacggtactttgaggggaagagctctgcgacaatcgcccaaaccatgggaccccaggtcatagcatatgccgcaatgaacaagcaagcgacgacaatcatacccttgccagcgttgggggtattggtaggtgtttccacatccagaacgaaatggccgatggatgagaagatcataaacatgataaacatccagatggctccgtagatcagggacttgcgacgaccgaaattttccacgacatataggccgccaaatgtagttccaaaattcacagcaccaaggatacactgggtcacgaagctgtccgagagaccagcgccttcgaagatagtggtaccctatcaaagaaatcggtgtcagcaattcctcgcaccaagatcccaaaatagaagaaaaggcttgtgtaggaacttacgtagtagaaaaagtagttagcaccgctgagctgctgcagtgactgcagaaccatgccaaggacaatacgatagaacatgcggggggcagtgaggaattcatcccacttctggccctcagactccgcttcaaactgctcacgaatctcgttcatttcttccaagatgcggacatggttctctgggatgccgtagagcttggccagggtgctttgggcactctcggcctttccgtggcgaaattcataacgtgggctttccgggaagaagatcataccgcctccgagaatcagagcgaagacgaaggtgataccgagagtgatacgccactgagcagtgccatccagagtgtgagtacccaggttgatgcagtaggccaagaaaatgccgagagtaacaaacagctggtagcaactgatcatggcaccccggatgtgacgaggtgcactttcaccctggtacatgggcacgagcagcgagcagccaccaacaccaagaccagtgacccagcggccaacaaccatctggtaccaatggccatcgggagaggtaatttgaacgatcaaaccgacgttgaggatcatacaccagagggtgatggaccacttccggcccaatttatcggcgacgggggctccgaccagggcaccgatcatggtaccgatggacaacaaggcgacaatgagaccggagcgcacggtgctgaatttataggaaccatcggcgccaagctcaccataccgctccaagtagttgctcatttcttggaagccagaaatctgacctgtgtcatatccaaacagcagaccacccatcgagacaaagagggccatcaccaaggaccgcatggttatccgagggattggggtatcgatacccacgggtcgcatgtgtttctccataggactattttgaggggacgactcgaggcttggctgttgagcctgtgtgatggactccccatggtgggggaacgattcggcacccatagtttaggttaggaaagaggaagtatgtatctgactgtcctgacgtgtgatatttcgagttgtatttaagagatacaatggactaggagaccagctcagaaggaatatgaagaagagtagaggaaaacaaacccatggggaagaagaaaactcggggaagatgggggaattgggggccttttgtaatccatcaatcaaagggtagagaagaaatttaaacccagagtcgaagtggggagagaattgtggagaggcaagttgcgcgagatgacgatgctcatggctaggtagtacttcatagtataaggtagggtggcagtcaacaatgcagcagcagacggctcgcacagccaccccaccaggggaggaagccatacagggcaggttccagtgattccaagtgggatagccgatgtggtcggcataggccggcaagtggcggattcaagcttataggccaaggccgtgccgaactaattcgggatcagatactttagtcggggccgagaaagagactgtacatcagttgctggatacggcgataaattttgaatctggagaaatcatccatggacagtggggcaaatagaaaacccggctaaccccaggccctcgggttctctccggatcgaagagaaattcatttcctaatcggtatgccggtgaaaacaggagaattatcatctccagacatgggggttaggggaaatgcggagtctggggatatgctacggagcaccaacctgagatattacgactacttcactagaataacattattccttgacaaatgccccatctcctccgtttaaaagcttataaataaagcctaatcccactatcaatcccaaacatcggcaaaataaacatcggcatcctcatgttgatatatcccgatgcgggggtccgtgggcgggtttacggggtcttacataatatcaagccccgcctgggcacacctttattgaattttcaattcatttccaattcaaatgctttctcgcacttttatttgtggcactattgattcttctaccgattgtcctctaactcataatatatgctacgggacaccatgcagtgacctctatcaactctaggactttgagaaatatgtgtgccccagttgtatacataagactgcgccttcccgatgccgacttccgaggtcgtcagtggcgggcatcggaggcgccacacccgttaccctaggtcttacgtcattgaagaattttcaattctttttttttatttgaccgtaattttcattgaattgataatctcgtacgtaatttacattaagctcataattttatgtaatttgcattaatttgaggatctgtttacggagtactccgtattccgtatgtattcctaacattacttcggggtacccaatatcgctttggcaacagcaatggcgtaaatctcgcctaaagcccaaacccataacgcatgccaatgcatccgcaacccaaattccggcatggcttttcctcatctcccaggtacggcggctcaaacgccttgaccaattgggacaagcgtggcaatttctccgcgtttgaattggtgcaggactttccccgcagttgcagttggtctatccagttctagataccccacatatgcaagtgggttggctcctagacgtcggtccctcgaaggctgaatcattggtatatcgcaagcagactaccgcctcgattattccgcggacgacacgggaggcttgcaccataagctcgatgggagcaatccgtggcctgatatatccttcagtcgatggaagaattttgatttcctaatccaaggtgggagttgatccccgtcttggacctcgatccccaagatatatatatgcattcattcattcaaagccagataacaagtgcactgcgaactctaggatcactatgaaaacactagcaatcttatcattgactagtctggtctctgccgaagctgctccctacgctcaatgtggtggaactggctattctggctccacaacatgtgtctctggctggacttgccaatatcagaatgactggtttagccaatgcctcgaatgtaagtgtgctcagatatgttccaatattgttcagtcgattgacacggaaaactccagattctggcagtggtaccaccactctatcggcaacgataagtacaactaagtcgacggctacaacaaaggtaaccgccaccagtactagtggggtggagttccccactataaatggactagaatttgaaattgatggaaagacaagctactttgccggttccaattcctactggattggcttcctcactaataatgacgatgtggatcttgtgttcgaccacatggatgaatctgggctccgaatcctccgagtttggggattcaacgatgtcaacactattccatcttcggggactgtttattatcaactactcaaagatggaactgccactatcaacaccggtgcagatggcctacagcgcctggattatgtggttacctccgccgaggcacggaatgtgaaactcgtcatcaattttgtcaacaactggtcggattatggaggtatggcggcctatgccactgctttcggtagcagccagacaacctggtatacaaatactgcagctcaaacagcctaccgggcttacatcaaagctgttgttgcccggtatatcaattcgcctgccgtctttgcatgggagttggccaatgagccccgctgcaatggctgtaacacttcggttctttacaactggatccagtctaccagtgcctatatcaagtctctagactcgaagcatatggttgccattggcgatggtatctaggcccgtaatatctctcccatcatccattgtctaactcatattatagaaggcttcggactggacactgggtctgatggcagctatccctacagctacggcgagggtttgaactttacgatgaatctagggattgataccatcgactttgctacattccatctctaccccacaagctgtatgtatatccttttcccatgacccttggtccagagctaatgtattcgcacaagggggaaccactaacgattggggcaatggatggatcacatcccacggagccgcctgtgcagcagctggcaagccatgtctctttgaagagtacggtgctacttccaatcactgtagcattgaggcaccatggcagaagacagcgttgaacaccactggaattgcagctgatctctactggcagtatggagacacgctgagctcgggaaaatcggccgatgatggaaacaccttctactatggcactagtgactttacctgtctggtgacggaccacgtcgcagccattgactcctagatggagcacggaaagagatacaaatccatgtcatcagccggcaccgatatactgttctgccaatctatgaattgtatgctctttgtcaagatttttgattatgatatgcaactcagcagaaataacggttttgatgtggggtatttatacatatgtacatgcaactcggtgcttttctagaattaattagattgggctagtttcaagagggtataaagggcttgatgtcgctatcgaaagacattttcaatgactggattccttcttggtgacttcagagtaggctgaaggttcaggggaggtatcatcctgctccacagcgtcggtagggggcccgcggtagttgttatagccccagacaccataccagagggcagcgatagcaatgaagccagcgaacaccacagatgcatagttcatgctctccttggtgacagttgtaagcgttggcatgcagaaaagaggaattgcaagaagactccagcctatgatagttgaagcggttagttgaaatccatatataaacagatggttttgttaaagcaactcaccaagagcaataacgttagcgatcaggccaaagactccaaagttgaagctaccgttcttaatatcctctcgaccacggaagatcagggagacggcgatcgggcaggcatagctcatggtcaagaaaatgacaccaacacccgaaaaggcattgtacgcagcagtggagccaaagtagatcacaccgagaagaatttcaacgaccattcccaataataaagaattgaaaggaatgtcaagggtcttgttgacagtgctccaccattttgatccgggaatgccgccgtcgcgggcaaaggcccaagtacagcgagaggtagcggtaacacaaccgacaccacaaatgatgcccagcacaagcagaggaattaacaaacagaatgtaccagctgagttgccaatggcggccttgaagatggcgggggtgggctggcccgaagccagattgaccaggtatgtgagatcgggaagcacgaagcagacggggatcaagaagaggagaccggcgataaagttgataatgatggttccgaccatggcctttgggaccatgatggcgggctcatggacctcctcgcagagactaacagagaccatatatcagcatgtggaacagccgacttggagaattcaaaggtgccaagactcacgagataatcatgccggtcgccgatgtggcgtaggcagcctgcaagagaccaatgaagaacgaccatcccgcgggccacccagcttgactttcaaagtgaccaaaaacccatgcggcattgtgacgcccttgcttggcgacagccaacaggcagacgacaatggcgagtagaccggccatagtccagaaaatagcgaatgtctaaaaatgatgatcatcagtatgattaccccacggggcaaaggggcacgtgcgacacatacctccaaccacggcaaccatttgttgccaaacgccgagatggagtgtgtcaggaaggtaatggccaagaagatcaggaagatatgccaggcctggaaatcatcggtgattccgacgcccggtgatttttcaaagacatccagacaggccacgaggagcagggcagttccaaaattgacagcgagggtaatggtgatgtttcctgcaacgtaggaccagccacagatccacgacgcaacgcgacgacaccacaagggcgacaagacaaaggtttgatagtagacaccacctgcagtcgggtagaccgaagtgatttccgccaatgagatagccacgcagagaatcaagaaagagatgatcacccaaccccagatgacattggccggcccacctgcggcgagtgggtagtatagagtggtcgacaagccatagggcactgaagagagaatgaagcacataaaggtaacttgccaaatcgatcgattgcgagccatctcaggcttgtatcccatatcctccagggtgcgatccgcattggtggtgctcacaccctgttcgacggtcaccccggagggatgactgaatccatcggcagccatagagagaatgaagttattgcgataggtttcggatctgcatacggtgcagattggttacatataatcgggacagtattcgagaatgggaacaagagagaaataagaaatataaaaacaaaaaggcagcaaataaagaaaaaacgaaaaaaaagaaaagcgccactccaacggcaaaacatggaaaaaaaaacccaaaagaaataatatgaccggcatatttaatgcaaggcgaatgaaatccaccccgatccacattgacccacccggctccacccaatccccacccgcatccacaggacacgagcgcgattaactttgagccagtcaatgcgcgtggagggacagggagattgttggcacggccaatcagactgcttctataatccaaaacacgactagtgcggtccttgtttcgaagctttcaagaaggaacaccggggggttgtggtctccgagctgacaaagaccagacggagccctaactaagagtacatacatacctggggctaacgggctggatattctgtcaacatcccctgacctaccaaggtactactccgtagttgtctcacctctaactctatacaaatacggagtccttagtgtggaaccacccgttgacatgatgtcggaggcgctggaggtgccaacttctgccagagccgaaatggtaaggcaaatgagaacctcatgattttaaatattggatgttttcgtatctacaatataggcatcagaggcccagattcagatagcaaccagaatggacgcccgtaataccttctccgtatacagttaaaagatccccctgattctacctgcttcccgatatcagccgtgttcccacaggccatcccgcaagtatagagatagcctcaattaaaagggggcacaggctttcggcgcaaatctttcattggccacggctatcttggctgcaaatttttactcaattcttacggtgtactccgcaggggcaagaagtatggcaattttcaaaattcacaaatcagatggtaacttggaatgctgagagttcaccttctgaaaagtctaggcagaaatcaaagtgcgcgctttctaattcccttccaatgaaaaacaccacagatatggggccgagagaatgtctaacatcatacggggtacgcatatccatagtcgcaacaaacgggtggcactactccgtacagtagttagcgacattgtggatgcctaaggtgtcggacctcggagcttttcaatgctgatattatttccgcatcttcgtgggccttcataacgtgcataacattattcattccacgccttctgaccctgtgtgaagaattccattgaagtcaaccctctggcgcccattcaggtccatggcttgctgccaagcgtgtcatacaccccaaagtactctttccagtgtctcgtctacgtcaaccatcacaatcatacagaggcgacgtatgcaacttgcgagccgtcattattacggcttcccaggattgatgtgttggtcgtgtagtgtgcagagctacctcgactgatacagaccgtacaaagccatatcaaattctatcctgcggtcgctaatttataaaatgcccaggtttagagcacaacccaacttttcaacaattcgactcatttctgcatgcgctaggaatctcgccctaggtgatatggatcttttgctccagtgaaacagatggatgacgacgtcgaactactgggacggtcggatttgtgcgcttcgtgtcggtctcggggcaggtggagacgagtgtgtccatgcttatagccttggatgggcaatcaaatgcagacaataggccttttatacagactgggttgtaaatttcgaacaatagtagatccggactctaaatgtcgaaggtttcgtctcggtccgcggtgggggatgtggggatcttgacatgagggagaaaattgtgggggaagccggggcttgaatttatatacggagtacatggactctctttgcacgacatttaaaatctatcattggattgcgaggataaaagctcgcctgggaatgacaagatatagagcaatcccatctcgcgaagtaaaatacttaccccctataggctctgcatgtgattctccacgtagatcctgatagcgttaacttaaactatattttgtaaatgtatcattgtatagcgatatcgctatatagattcatgctatatcaaaatgacgtcggtttcctaattgagcgccggcgttgaaaaagtcctatctcaaagtcgttcctcctattgtattctatccagcctccaacatcgctttatcaacatttcccaatctcaccatgacaatgaataatatattttcctctattgccacttccaccaaccatctcaaggccaaatatcatggtcatatccaagctaacagattcaaactgctgatacaagagctccaagaagcagaacagaccaaggatcaactcgactggatatctgaacatcgccaggagacaagacgggctaacaatatcatccaacgggaaatgtatgtgggtgcgacatatcgccgctatgaagcccaagtgcaggttgaaaccccgccagaaccttccaccttgaaaaagcttcaggggtgcaatgtcgagctcatgctactgaatattgaatacttccaacacctagagcgaatggcagaactccttgagcgcaagccatcgggatgcctcgtccatcgacatacaaaaaatctgcggcacaaatccaaacagctctggaatatcgaacagatctactgccaacttcgtggcggctgctgcgctcgtgagtgtggttgctgtggacgatcttggcacaccattcgagagccttctggtaaggttcgatatatgcactgtacgggaagttgtggatgttgtacccgccatcgtggttactcttcttcaagtgtggtcaggaagaagtccggcatgtaagcttaacggtcgacaagccccaagggacttcgatttgtgaagggggattgctctcgcataatgcttgcataatttctgcgatatcttccaacataaaccttgaaaggtgccctggcctttgattcgtcaatcttaactttatctcctatttaactttgctcgtccttttctgatacgagattatttaattactctttatctggtctcttgcccggtctcttggcccagcttttttttcttttcttgtcggttattcgcggccaatagtatcgtggactggtcaccggaccgctggtgttgttacttagggcgccattttttgcccgtgttctattagggagttcgagagatcatttttccattctgccgttcacggatcccagcttttgctgtcctctaataatctcaaccatcgaggtctttccggttgattatgcaagtatgggcactaaccgtggaaaagaaaactcggggtataagctgcaataatgaatatgttgtacgcatttcgtatgattttgcagtcttatctccggctggaagtctagtggcttaccccaggattgtacctttgttcaggcctaacggccattaggcggccacggacccctctactgaccagtcattgtccagagatatagcgatttaatacggcgcggctgggggtctctgtacgacgggatggaaatgcgctgtggaaaagactcttaaatacggcatagattcctgtcgagcattttttatccagcattttccgctttcattgctgcacaagatggcaacaatagaaggtgatcaacatccgatcagcgagaagggcaaatcacttcgaactttagtcgaagccgacctgctcgatgatcgttatgtaactacaaccaaacgtgggttgaagaatcgccatgttcagttaatggccctcggcggcacgatcggaacaggtaagtctgcagtgcgacatgaaaaaaaaaggattactcacataagtcaggacttttcgtgggttccggccaagccctggccattggaggccccgcatcgcttctgttgggttatctcttcatctcagccatggtttatggcttggtcacggctattgctgaggtaggtgcctatcttccggtacatggtggaacaatgagttatcatggattccgctatgtgtcgcggagtatgggtttcgctatgggatatctatactggtactctctcggaatcttggtgccgtacgagatcacagctgccggactggttattggatactgggaccagaatggatcaatcaatatcgcggtgtggatcacagtcatgatggtcgttattgtcgcgctcaactttatgcctgtgcgagtatacggcgagtcggagttctggttcgccggggtgaaaatcatcactctgatcggtttgttgatggtatctttcatcctcttctggggtggtggacccagtcgtcagcgactaggctttcattattggaataacccgcgtccattcaacgcctatctcgcaacgggagattcgggccggttcgtggcgttgttgaaatgcacagtatccagcgccattgcgttcattttcgccccagagctgattgtgatcagtgggggtgagatggagtcccctcgacgcaatataccccgggcagccaggagatacatttaccgattgatcttcttttacatctttggtgtactagccattggtgttatatgcccatccgatgctagtcgtttgaccaagagcgacggcacggtaagctcatcaccattcgtgatcggcatccagaacgccggcatccccgttttagaccacatcgtgaacgctgccgtcttgacatccgcctggtccgcaggaaattccttcctgtatatgtcttcgcggtcactctattccttggctatgtcaggcaacgcgccacatgtgttcaagacatgtaaccgatggggtgtcccgtactgggctgtttcggtttcggcatgcttctcagcattggcttatcttgccgttggcaactccagttcgattgtgttcaactggttcgtcaacttcaccaacacttctggtttcatctcatggatctgctgttccgtggtatttctccgtttccgcaaagctgtcaaagcacagggcattgaacagccgtacaaatcaaagatgcagccgtatggggtttattttggcctcgcgggtgccactctgatggcgctcataaatgggttcacagtgttcttcccatcggaatggtctgtgagcaactttttcaccgcatacattggtattcctgctttcctgattctttactttggacaccgggcactgtattggagtgatccatgggcatggcacccagaagaagtcgacatgcacacgggcttggatgaaattattgctgctgagcagccaccaaaaccacgggggccttggtggaagttttggtaacacataataggagctctaggggagagtatgtttgccaggtttgccaggtttgccatgtttgtactgtttgtcaatgtcatgacgtatcaactatccaagcgggtgtactgtggccactcatccgccttatcaccagacgaatatcccataacatccaatagcaattcataactcaacatctttttgctccgtaactcggagttggcccttatcaatatatttctgtacggaaaatagccagtgataccttctttattactcccatcgtcccacctattctctctcgtgttcggtatacgccgtcgaccgtctctctcccacaagttgcctttagtatcagcccaggactataaagactgccgtgtagaacatcatatgaaaattcgatttcgagtcgcgaacctgaaatcttaaagaatcagaactatggctgtgttaccacttaccgtccgtccgcttcagcctcctccgggctcaagcattgattttggtgctgaggttgaaggtgttgatttggaaaacttgactggtttgtggattactgccaattataagagcacaagctaatggtcatatagaagagcagtttgccactattcggaaagccctctacgagcaccaggttgtggtgttcaaaaaccagaaagggctatcacctaaagcccagtatgagctgaccaagcgattcgacccggtttccgaaaactatggacatggcaagaccattgatgcgaagcgaagcatcctccatcctgacctcaagactgtccctcaccagccacaggtgcaggtgatcggaaatggacatgttgattcgtacgagggtctcaaagatatcacattacgacaccctcaccaccgcacattccacaaagatcacatcccggacgataaggactatgattttacccggttttaccgctggcatatcgatgccgccctttacgacctatacccgccccaggtgacaacgcttatggccgtaagtgtgcccaaaggccgccgacagacattattgtatgatgatggaaccggggaaacaatggatgtaccacttgggacaacagcgtttgttagcggagagcggatgtttgaacttctttcgcccgaggataaggagtttgtgaagacaagcaaaattgaatatgccccccatccgtaagatcccttatggtattcccatggctctgatcaactgagctaaatatcacaacaggtacatttggatgagccaagcgcattcccgatctacggggctcggtctacactcagaaggactcgagttgcctgactcggaacttccacctatcgaccctagtaagatcatggttttcccaatgacctggaaaaacccagtgacgggcaaattggctctccagatccatccctctgctgtacggcgtatccactgcgccgatggaaccacgatcgatgacttggcccgtgtacgggacattgtctataagttgcagcggccggccatcagccctcagtatgtatatccccatgactgggaagataacgacttggttttattcaacaaccgtggcgtgctgcattccgtggttggtgcattcaaacccgacgaagtgcgactgttccgtcaatgtaacttggcggcttcggagccaccagttggggcatgagtgctttcatttcgatttcgatttgacatttctgctgttgtttgttaatattggattttcgagggaatcaatcgaacttaatctggcttgaattttttgaactgatataacttaaccgcgggaatcacatcttgagtaatgaaatattatatatcggatgttgtacataaaagacgccatttatgtatctgtaaaaagatctatgagcgtattgacaaggattagcggacaatgtaaaatccatgtacggcaatttggctctctctgagctcatcggtgacagagcgaaccccaacccggtgcaatggaacttgctctaccaacttctgtcctcggttgacgatactagtacaccccccgaccgtgcgatcaatccaattcgaattttgttgaaggtccggatgttccgctgcccacgcgggatgagccagagtatcatgtacaacagatgcgtcgtacacatcagcgagcagggccgcctcggcagctgccacttgcgcctcggcgagttctttgctcgtagttccagtgggtggtgggatttcagcgcgaaggtatcccaaaacacgaatctcgattttgcttgtttggagaggaacgtcctgaaggaggcgaatggcgaccacacgtttcgatatttgagccatatttactctcgtcgcctggaggggatccaatgcccgcacggacaagatagctgggtaccatccagtagtcgagcaacctttgctcgactcaaggtcgaatcgaacccagccgaagaagtaaccccttaactgctccgtcacccagtcgggcattctgattaagcttaacttcggcatattgtcatggttattggggtacgaggtttgatcgggttgacagcgagctttgaatgtcaaaggaaacggtgactgggggccggcatcgatagaaaccgggctgcttccagctatttctggcgctgctagatttacttgagatcgtccaataggacccttggagccattgatgataccacccacgcggttctcaacaccactcatcgtgtaagccttttgggccgctgtcattgtcacccacgatggacgaagcgcagcagcttgggcttgaagcggagcagtttgggcttgaatggctgagacggccggacctgccacggttcgcgctgcagtttgggcgtaaaggctcacaaccatagccccaacctccaagggtagcgtgctcaagctcgcgccacggatagagctaggggcagtggatgcagagagcacccggaacacggggctattgccaagcaccttcttcttgactccttggcagagaactagctggaaatatccatcgcctgcttcggctggaatccgtacaacggccgtctcgcgtagcttatgtgtatcgcgcggacgtggcggggccttctttcgaaatttcttgatgtcgcgttgccaagctcgttcatcatccggagtcacctggtcggccctcagcggcatacccggagtcacatccagccagctatctcggagattgaggaatgacttgaattgcattccggtcttcccggtccaacctttactctgcaaccacaaggtgtgttcgggaggtaaaggggcatcagagaaaattgatatagcgaccgatgtagtgggcccacggtagaagaccagtccatgggaatgtcgcaaaatggtgacatgcttgtttgattccgttggacgattgatcagaccagtgaggaaatacctagcttcgctgtatgccttctgaacaggcgtcggaggagccggagatgaggttggccccgctgtccttggtcgtggcagtgagcctggagttacaggcctggaaggtggcgtcccataaaggtccgtatatgatgggggctgtgatgatgggggtacaagggacggggtactagcagcataagctgtcgcctcccgctgatcggcatgggctgtagctcgcaagttcgggtttgacaggggcttccgcttgatgcgaaatgaatctggcggatggctcgggcttaaatgactagaagacattttctacatgatgttcaaggaattcaagaaattcaagaaatgccgggccctccgatttattggaatcatcactcttggccacttgcccccattggcccgagctggatattggcctgaggcatacattaatgcctgaggttgtaggccgttctcgagaatatgcgaaatatactgtaatcttattgcttttgacctcagctcgtactataaaactaggatgtattgaaggctaatggtatgcacctgcacatgccattgacctcctgcgttgggattgatctaggtgtgtagatacctcgaactagatccggactcgcggtatggcatgcatggatttagattgcttcaattatatgttttcagacatttgacctcttcaatttcaacactgtactatctttcagtatctcctactcccattcgtctctgtcattgatccgttcatctatcctccagcaactttgtagagtgctcaatctcattgtatgagaaacaaatattcatgactttcaccatttccacagctatcattgtcagtttggatccattccaaggctcttaaaactaacacacctgataatctatcaccggctgtatcatcctcatcccgtccatttatccgagtgtagtggaggacaaagttgacccgtggccgacggcccgcttggtacatttcaagtcgcgtggggacatcgtccggcgtactgccacaagggagcaaggtggcaatgctaactgcatcttcgattgccatagctgctccctggcccaagtctatcgagttgtcagtgtatgtcacacaaaacaagtttgtccatttgcagctattcggttgcttacatggctggaacggatgtgctgcatctcccagaagagcagcgtggcctcgagtccaagtcggcagttcctccatatcataaagatcccatactttgaggtttttgtctgcacttgcaataatttgctgaacaccgggtgaaaacttcgaaaaggccctcacaattgtagtctggtctccaactgactgccaggctattaatcccaatttgtcagtaaccttctgtatcaacccccggaaacctcttactgtcactttggttgtctgcctgaacttcattcaaagggacaaaagcacaaagattgaggatcttgctatcagagcaagggtaagccacgagccgccggtcatgggatgcccactcaataaacacgccggtgtctcgcacaaaatcaacagtgctcgcatgttgctttaattgatctgtgggaagaagccaacggaagcatgacttgccaacggggtatggggagggagatcctggtgcgatactctggcgaatttgggactatagaacagttagaacagggacgagagctggataaacaccggtgttgataatctagtgttcatacatgtagtccatctgcaccaaggagcaggtcagccttgaaagtgcgaccatcaccgagagtgaccgacggacaagccccttccagattgacctcggttattctacaccctgtatgcaacgttgcggtttcaagggcacgttgtttgaggtggttgtgtagctcaactcgatgcacgaggtaccactcctgtgttcagattagatattgtcctggctgggtccgcttcattcgcctaccgcttgccaatgatgacgagtgtcagcaaactctctcttgtatgtcaactccccgtcaaatctatatcggtgtatctggagaaagcaaaaaatatcaattccagccactcttcttgtcaagagacaaatctgacctgatgaagcaatgtgcctccgaaatctgctggatcaatgcccatccagcgtagcaaagcagtgcaattcggcggcaaatggatcgcagccccagtttctttcaaaaaagcagacttttccagaatctaggcttggtgagaaattaattttgcagcaagcttgggttgttgcccggggcataccacaacacgatgcccctgttttccgagggcaatagctgttgagagaccagcaatgccggcgccgacgacgaggacgtcaagaggctgggctgataccgtcatgatgaggagcctatgtggtttttgagctatatcgactgatttcccttcatgaatctctgacgtgagatttatagcggtatgctctctcatccggtttccgagtttggcaatccccgatacttatctccgagtcagccaagagaagtggatgcttcaatgctgctagatggtccttgcaacctcggatagcacagcggtatttttgagctgaaacggaaggaagctatcgggcgcacagaaattgttgaatactgttgggtcgaagtgatcgacactgcattgttggacacattttccacgttcacctccccttcactccccttcaccatatccactccagtttgaattaatatggcgttgacacatgaaaacggtcctttgaattggagtcttataataccgtgtaatatccatatttccgataataactgttgtgccgctgtcatttcaggtagtgtgcgtggtagccaagacctttcacttcgttagccaatgagaatacaactgttgtgcatttcgcgtcagatctatccgggcaattggcgcgtcattaaatcaattgccctatggggagattgctagtcgtgaacaatataatattgcttaggctaattgtttatgggacgaggcagacagggcaggagggaagaagaaggtgaaacgtgttgatatgccaggagttcgtcatgtctacgagagcaagccctgtaggtatgtacgtgagaaaaatatatatatatatatatgattttagattgaatttcatatcctcattcagagctttcttggctgcccgttgcccacttggttggtgatgttgtagtcaccatagcaagcttcctggtacatggcctccttgttgaggtcgggaatagctctaaggaaatttttgaccttgcaaaatccattcacagagccatcacagaccttgagaccatcaagcggcagaggtgcattattcagcacaaatcggatatactcggtggtatcagacttggacgacaggtcagggttcttgtatttttgcacctgaagatccttgaatgcgaaatcattggggcaggtccaaacttcagagaacaagcgagcgccaaagggtgtcatctggtttaggttgaaggtgcggtgcggggcgtgcgcaaccgagacaggcaagccatgaggaccgtacttgaaataatccagacccaaagcagtcaggacagacacgatgatatcatcgtgggacatgtccatgtatagtggctgatcgagcgggaaagtcttgatgttgtcatcgtacgtgtagttgatgctgctgtcactgctcgtgatgagcctagactgcagacgcgctgccagctcctgaacatagccaatgccctgggcgcggccactgggggacccaaaaccgtagtcgccgtagaattgaagatcgatgtagtattcaaagtcgcgccactcctgctcagtgaagagcgcgcagaaagaggactggcccagtgccgcatactcgtacgggcacatattaagcatcgctagaatgtcgaaagtgtcgagcttcagatcctggggaaggtgtgcagcaagacgctctcgggcatgtttgacaagagacgaagcgaatacctgcgcagcgttgtcacccggctccatgccattcgggcaggaatcggtcgacgatagggtattgttgaagtcttcgagctcggggataatagtcagattgtactccgagtatgagctgttggctcctgtgtttccaaaaaagccacccagccaccagcgagcactctccaaaattcgggggtacgaggtcgtgcggaaagtcggctttgggcgcgcggtaccattgggatacacattcagtgatgcattccaggctgcattggcattttctgcgcgatagagcaatcggccatactgactccagaattgagcgccggaagtggcttcggtggcggcgccagtgggtagcagagtgttcaaaccaagcatatactcccaatcgttcaaaaaagacagaggtccggaaccgattttcttgtgtggatttttcttagtgtagttggccagtttctgggcaaagttctccatgccttctccatcgaggggccattgtgtaggataccgctgggcatggcggtgtagcacatgcacctgcgacagttcacactccgatggaaaccccttagagacattgaaactggatgcatcggcataggggctgaggttggcccagcttgttttcatatcaaaccctgacgggtatgagagaccggtgggactggctacggccgtggagctcgatgccactgcagcagtgcttaccgcaagagctagcagggccatggcagatgattgtagagccgccattttgatgctattgtcgtctctgggcacgcgacaaacttccaaaaacaattcgaggaatggccgacttacccatttttatctgcccctgtggagaggggaaaaggggatcgaccaaatctctttccttgcgtggaatcgcgtaagtccgttctgtccggcacgatgtgaccctagaatcctcataatgttgtattttgctcagggacaagataaacatccttgagttgcggtgatccccgaaatttcaatagccaagctcgcgtggggaaatgcttggcccgacgaagtccgtcaaaagccgtcaagggcaaaaaacaaaggagaaatacgagactttcaagggctgggggatgagccaacgggttgtggccattaaatgggcttttcttgcattcgtataaacccggtgatgcatcagaggcaatcaaagagaaggcaaaagaaggggggaacacatcacatctgggcacatgacctctcccagccctttaccaacacctccgctttgctgctataagaattcagctctcgggtcatgggctatacgatatcccgaaacccccattcgcttaccttgtaccaattgggatcaatgcagatgccatgtcgatgcagctgctcgtatcggacacgagaccacacttcttagagcctgcgcctcaactggatcggaagctccaaataaattgtttctgattacgagctctatcatgaacatgtgggagaaaccataaagcgcaagggatccggccctttcgagcagtttttttctttattttgatactcctaatgcagagacctccaaattagctatatcctagctattattgacttcactatgttggccctcggtattgtcttgtatgccctattgagtacgtccttggcctttgctatcgtcaagctagccctattggctttcattgctgccgtatattctggctagcatgctttgctgacctcgccagcctccttggtggtgctactattacaagctcctactacaataccgtcattgcctttggcgtgctactttggtaggttcctcggatagtctccagacaatacacacgcagtacaaagaaccgacctgacgcttacctcatatataggctgctatttattgccctagttatatttaccagtcttgccatgtgtggtgttttggtgtctgattgggctgggtaccagtctcccaggaaggagaagggagttggtatgaaccaaactagggctggccctgctcacgaagtgccgacgagtatgagtcctgtggttccatagaagttgtgttgtcgtgatgctaaaggtctttatgaacagccgaacagtcaatggcttagcccttcatcgccctcgcccacagcgtggaactgagtaccacacaggtccgcatgaaaccagtccagcataatcaccacagttttggtttggtaggattcgcaaggaatagtaatgggtctcatcggtaataggttatatcttttgcgtgtttccgacattctcatatcacctacactactaataatacgttatgccatgttaatatttgcttcaatgtgattatcaagagcatttatgttcatacaatccgcataaaaccgctgccgtgctgtcacgactaatcaaaggaggtatatagtccaatctatccgtctgaacaaactgtgcgtcgcaagccgtaagtgtccagtcgctgtaaaaagcataatcgtcaagcccgagaaaaggtgagaaggtaaaaagcaaacccaacatgtatgtccaggatataatgagccggctatcaagaaagacaagaccaggtacgagatggtactcaaccaaaaaaaagaaaagaagaatgataatggtaatgacgaaatcaaagagtggtctcttccacaggctcttttccaccgtgggtctcctcatggtcgtgcttgaacttcttctttttcttgtccttgtccttctcatccttgccctttttgctcatagcttcggccataagctgctcgaaggccatgtaatcgccttcttcctcggggtcgcgtgcggcctaaagctagctgttagcatgatactcaatatgcggaaaacaggtgtatatacctttgcgtatatattgccggcaattaccagcgcatgcgcacgctcaatccgtttctcaagtcgggtccgcttatcgcttagaatctgatcacaaacatcacgcaggacactctggatctcaaatttgctgccacgccacgccgctgcgaggatcttgccagtcactctcttctcgtattcagccttcttctcgtcagtccagtcttcaccaccgcgttcctccatcttagccatctcctccatggtcatctgcgcatcaatggctgtggagatggtggtccatgtctccttcgcaagagtgcccttgtccttcaagcgagagaagaagccagagatacctaggaacttctgtgacttgaggaaggaagtacccttctgaatgtatgtttgaccaacagcgtggagaatttccaaaccgaaagattccatttttaagttctccacctcaagtcggatcttctcctcgaaagcatgggacacgtccttacccttgtccgtctcagtccaaacgcttaaacgatcaatcagcttatttgcgagtgtgttgacacgatcttcgcgagcctttctgcgctcatcctcgaaagcgttaaggcgttcctgctgctccttagacaaacccttcttcttctccttcttgcgcagctccttctcctcctgagacagaccggctgcctccatgcgagcttcttcttcggatttgtccatgagggcttgctgtccgaaatttcgtcgaggagtgctggtaccagagccttggttggagactggcttttcagaggggccggcagctgcagctgcaggtgcggcctctgccgtagaaccgtgggtttcatgaacaggaacatgagcgggatcgccagctgcagccttcacctccgcgtcatgaatgttcagtttctcttcagcagattgagccagttcttcctcctccatttcctgcatcgtgatgtccatagtcgcggtgaggtccttcataagggagatctcgccgataagatcaacaaaggcctcgcccccgaagatcatactgaagaattcggacgggtcctctgtggaagacaaatcagaaacggtgtgctggacattggtatgcatgtgatggacttaccgaaaccaccaccaggtaccgactcctccttaccaaacttgtcatatcgctttcgaagatcttcgttgctcagaacttggtacgcctcaccgatctaaattaggaagatatcagttccgcgtaacatgcatcatccctaggcttgcgcaatcataccgcctggaagcgttcgtgtgcggtttcatctccagggttcttgtctgcgataatggattagaaagcctagcaaggaaatacaaggtcacatgcggccatacccgggtgagtgacaatagccagcttccggtaggcctttttgatttccagttcggtggccgtcggtggcacacctagggcgtcgtagtaagcagtatcggcaaccatcgcagcgaccgagcctaacttgagaacagattgaattgatggaaaatgaaagctcaatagattcaaagatctgaaggaaaaaaaaaacagtggaggggtgttgtttaggcagaacctcgagatatttttcggaagttggcgctgatatcatgtggggttgtatgcatggtttgctccggtcacgtgtcggctaaactctgcatttaatctgttctggccttttccccttttcctccccccaatccgccgttcccccaggttctgttgtttttgtttgtttgtttttattaatcctcgtcttcaatacctttgctttcggatcctattccaattgcttcacttggtgaagattcagctactttgcaacaactcttgaacatccgactcgcgcgcctctcccccgcccatcatgggtctcatcggcaatgctctctactactctttccaccccatgcagctgaggtcaattctccaatggtatgtttaggtgttcctgaagctcattcccacatgcgaagctaacgatccacgtcacataggaaagtctggcacaacccgccccatgagcgtaacgagaagaacgagaccgagaatcagaagatctgtttccagtttttggacaaaaccagccgcagcttcagcgccgtgatcaaggagttacatcccgaattgttaatccctatctgcatcttctacttggtcctccgtggactggataccatcgaggatgacacttccattccattggccaccaaggaacctcttctccgggactttaaggacatcttgacgcaagatggctggacttttactgggaatcggccggaggagaaggaccgtgagctgctggttcagttcaaccacgtcgtcaccgagttcatgaacatgaagcctgaataccaggttatcatcaaggacatcactgagaagatgggtaatggcatggctgactatgctgtgaaggcagagcatgacgatgctagtgtgaagactaaggaggagtatgatctatactgctactacgtcgctggattggttggcgagggcctcactcgcctcttcgtcgaggccgggtttggtaacccggctctgttgaagcgacctaagttacataagtcaatgggtcttttcctccagaagactaatatcatccgcgatatccgagaggatttcgatgataaccgacgtttctggcctcaggaaatttggtccaagcatgtcgacaactttgaagatctcttcaagccagagcaccttgatgcagctcttaactgcagctcggagatggtcctgaacgcgttggagcatgctgaggagtgcctgttctacttggccggtatgcgagagcagagtgttttcaacttctgtgcaatcccgcagtctatggccatcgccacaatggagttgtgtttccgcaaccccgatatcttccagcgcaacattaaaatcaccaagggagacgcatgtgaactcatgcataagtcaacccaaaacttgtcggttctgtgcgacaccttccgccaatatacgcgcaagattcacaagaagaataccccccgggatcccaacttcctgaagatcagcattgtctgcggacagattgagaagttcattgagaccatcttcccgacgcaatccgccgaggccgctaaccgtaaggtctctggtgagctcactgcggccgagctacagaagaagaaggaagacgacgagaacaagagtgatgtctacttcatgatggctctcatgggagtcattgttgtcgttatcgctagtctcatgatcttcgccgcctggatgatgggcgcccggttcgaccttgcctttaaggagatcacgtctggccacttcaggccgccggctaagaaccagcttgaacacccggagctttgattgtcttatattattttcacatccacggcgttacgaccttttactgtctaatattttcgattcccccttcggcatattgtcttactattttctcgcctgcccccggcgccctcgatgtgtattgataataacataactctttcttttctttgcctcgcgcacacacagactaaccctcccatttctaccccaccctttttagcacggatgtcaaattgcgatctggccttttcatggccgaggttgtgccgaagaagtacttatatcgaaatggagattcatctccctagccagtgagtactagatctttgtccaacggttcgcccgaggtggcaaacatccattgaagatctagaatatcccgtgtatgtaaagttgtatgtctataggaaatgaaaccatcagcctctggaggttgactcttgtcctgaactcagataactgaaaaccggcgggactagagaacaggcccccaatcagaagtttctgctatagtgtatatcttttatttctcggcaataaatttcttccaactgccggcccatttcttttcgctttctcgctcattactcttgccatctatccatcggccaggttggcctccccgaagcatcctcaatcaaatgggttccaaaaggatggcttcttcttctggggactccggcgactccccactgtccgcgagtgatttccggacttataatcgtatgtcggagcaaatggaaggatttgtaagcttaccatcacacctgggcacctgggcacattagtataccttgagcactaactctcatgcagcatagtcatttccgtttgacatggaaccagctttgggaggcctgtgaaaactctagaaaacgggggctttcagcccgccagatgattatgatgggccttcaattctgttcgcaattggatttccatcattccatcgaagagcaacacatcttccccgtattggcgaaaaagatgcctgagtttcgaaaggagcttgagctattgagtcagcatagacagatccatgcaggactcgagaaactcgagaagtatcttgagcagtgtcggtccggcgaggaagatatgcgtcgcgaagaggtgaaacggttgatggaagggtttggcaaggttctgtggacacacttggaccaagaggttcaaactcttggagctgctaatatgcgcaagttctggtctcttgctgaaatgcgccagcttcctatgtgataataacgaacggaggcaagttttgtcaatttcattttcagaaacatgtccaactttttttgaagagtatacatatctgtgtgcccatttgaattaattcgaactattctggtttgctatttggtcttgaaaaagcacctatgttttgtttccgagggatctgcttctgcttcatcaatgtccatcacaagccagagttgcagtttgataatggtaacccctacacgaaaatccttggcttagagtcgagtgaccactgctaacaatgtggactgttcccggaagctccaccacagcgtacttgggaatgtgaacacgttgtcatcccttgcctggtatgtatactaaccgcatccaggtagcattgcaagcacgcccccaacttctgctgtttcaaaaacccttgacactcgacccagtttgtgtatgtttctttcttctgttggcgatgatgtcgtgcgaaacaagcactctcagttttaccgattcatcggtagatgtagcgagaatgccagggtcatatggaacccataaatacggagcagccgcaaagcttcggaatatcgacactacatataataaaatatacattgttaaccttcaatgacatgtgcgtcacttcaagttgatcaatctcgtggcagatatcggggccgccgatcttcatctgatccgtcagcgctcggctgtcagatgtttctgtctccaagaatgtgctctcacagaagtgcacaagctcggccgagctgctcattttcactaggtctcacatcatgacgataacggaaaggaaatcttggcttggatcatgaacaatcggcgggaaacagagaagatcaacacatccgcagcaaatgcaggtcatgaacctattaatcgacgtggctgagatccccagaaataacctgacctttttcactctccatatctccactccagtgggtccataattgtatctcatcttgtgtctggggtcatcagtactacaccacgcgctcctttcctcatgcggattgggcatgatgtcgtgccgcatgcaacttatatgaaatacaggatataagtaccatcggaccaagctcgagaaatattaggttagtcaggttatagcttcgcccttgctatctataccgtgtcaaaatccgctcaactcactgccgtttccaccaacatgaagttcacaaccaccacgatcctaaccaccgctatactagcaggcagctctctcgcagcccctcgcagcggcctggttgaccgcttgcagacccgtggtgctctgtcacgccagtcactacctgccgaaaagaagggtgtattactgagggaaggaaccgagggagtcaatgttcaatacagcaagaactgggctggggtggtgcgcgagaagccacccgccagtgctacctacaccgctgtgtctgcaactttcaccgtccccgagccaacggccaccgatggctctggggatatgcaggctgtgtccgcctgggtcggtattgatggggacacttacaccaaggccattctacagactggcattgatgcctacatccagaatggcaagaagacatttgacgcctggtacgagtggtatccattaagtgcggagaactttgaccttgcattatccgcaggcgacgttatcgttgcgaaggtcgagacagattcgcccagcaagggtgtcgctatcatcgagaataagtcaagcggccagagtgttaccaagactctgtctgcaccttcaacctccgccactctcgctggccagaatgccgaatggatagtcgaggacttcaacactggtagcagcatggttccattggtcaacttcggcagaatcgattttaccggcgcccaagctgaggctggcggtacgaagtatggtgtcaaaaatactgctgttttggatatccagcagaatggcaacgtgaaggcccacgtggaagtccgaagtgacactgagttctctgttacctaccggtgatttgatatatatatcggagttgatgagtctggcgttttgtacaatggatgatatccgtcatatatctctcaatcgagataaggaggaatttgcatcagcaaagtgaggtatacttctttcattcaatttagtgaaatctatcaaaagaaaacaatgattgatcacgtcatttatttcttcctgtgataattggtcaaaatatccctgcccggatcctgatgaccctttattatcttttctttataaaccgcgtattcagacatgttgggcctataattagatgaagagtgcgcagaagatgttacgaagaggaaagataatagacttcttactaactattcaggaaccttagaaatacacatagcatcacaaagaaaaggacatattttggatgttgaacaagaaattcgctgggatgacagaaacgacgacggggtattctgctgaatgataagaggaaaggacaacaatcagatcgaaacgctcagaaaagataaaggcaaactgtgagcctagtaagggctcgaggtgtcggcaagaaggctgtacgagtttaattgaatacccagagggcgaggttgaggcatcaaggcgcctagcatctgctggtcatcgtactcattgcctgttccatctgtaagcgcgaagaacatggcagatggtcggttcacgcgcaaagcttccaggatgtcgtcactccacaggcctgtgcactcgttattgacaagttcgaaatacggattcagaggcggacagcttgagtcgaggttgatgaaacggatgcgcaaatactccagggcagggaggacggataggcactcgattgccttgaccaccattgcctcaaaatcacgaatgaacgcaatgctggtaattggacgtgtcccgtagctcgtctgcgtccagtgattcaatccgtctaccttctgattgtgacagcacgtcttgactgaaagatctagtgacctgagaggagaaccagactccatttccgttgccccttccttcaatttcttgaagaggtaccaacatacacgaccagagtaggtaaatgactcgaagcgcggaattgcctcgccaagtagagtacagatcggaggaggcgcgctttgagagcggaaaagcgcagacagcaacctattactggcgttggaaaattcctctaggccaagattgatgtgtcggatggtaggtggagtatcgataaagatgctcatcatgatcaagtaggcacacagatggggttggacccaatcacaatgccattcactcaaagctggcaacgcttgtgaaatgttgccccagtcgtcaacttgtcgcatcaggttccaggcaccacgcatgatgagtgtctgtatttgtccaagaacaggtagattccgaccgttcatggcttccctatagcgggaatgccgcactataggcgcattcttgcagtggccaccctccagggtgagaacccgggcagtggggaaaaggtactgaataagccagaagatttcctccagcgaagtgttaccggttgcacggtgataacgaaaaataacatctccgtggttatgatcatgattcgtctgcatatctacaacatgttctgttgcatgggtgccattttgctctgcatttgagcgagcatcgttagggcgaacggcccgatttccccagataggcatccaaatctcaatgtgacagacatatggagccaaatgggggtttcgcttgaaccaccatacacacttgatcaattcgcggttggtgcctttgattttgactagataaaggctactcattagtacaattgcgttgaacttcagattgacagtcagataaaactcactatggcggtagattcgactttgaacaagtccagtccacatccggcaagtcagggccaggtcggaaagggccttccgccgcggatggtggagagccttactccagttctgagcagaagattgaccatgtgctgaatggttactaagggaggctcttttgccaaagatttgatccagaatgacctcatggatctcaactgggagctctgtgaattggattgccgactgtcctgccaggggatgagattggtcctcactggcggcgatatgggaggtaagggtttggtagtcatcctgaccaataatatttgcactgatgctgcagtttggtttctctgcgctttcaggaactgcaacaggtgcactggctaggggactgaccgaccccggccggagagaaattgcggagatcatgagggggggtagagatgaggatgaaagaggattggaagagtcagaggccattgatgcgacctggtcttctttagatcagaggctgcagcctgatagctgcaatttgatatgtgttagtgaacaaacgagccatgccggggatatgcatatagatcgtactcacctcacagctgtggttaaccgctatcaaagccgctccggctcaattcagtttaggtacagacgggttatctcagaggatcctgttcacaaatgaatgaaataaacgtcagaaagagagagggtcgctggccgatcaggctgttgggcagcttgatgaggaggattggaaggggattggcggggaagagataggcccggctgaaagtgaagagacgtgaagatgaaagaagaccgagaacacagtgaaggagaaaagaaaagcaaaatacatagtcagaggaaaaaagtgacgggggagtcagaataaacgcgggagacgttgcgcgacacgaagttctacggttggaatacttgatatcggggcttttgagaaccaagacaagggttgtgatcaataaaataacacgaacataatcaaaatagatcgaagcctgcattatacatgtatttattgggtaacaactatatcatgtcgtagatggtgtacatgggccgtgatagttcccttggccctatagatgccgtcgttttcgcaataagaaacatgacaggaataacagtcattgcgattgaaatcggacattatttccttgcagacatacataacacagatcagcaaatggatgcgagggtatcgatgcagagtagacgctacaaaaccattgcaaagtgagaaagaaaaaaagatggaagctagcgcttacgcctgaaacggaaacgaagttcatcatcgctgtccgaatcgcgctcctcgcgagccctcttcgggggccgagccggagttgggtccgaggtcggttgaagcgaggtgcgtgtaatcgctgacagcttggaccgtgatggagcaacttcatcgtgatgatcagattcaggacctccagcctcgttctgagggtaagtctcagcaggattgccaccccaatagtgatcgccaattccatagtctttgcgggtcacttcttctaaggggacgatcactgtctggatgcgagctcgactacgcggctcgccttttcgccggaacttcttgaaattcttgcgcccattccattgatcatcccatctgtccgaactgtcatgctcgtgcgctggtgcgttccggacgggaatctccatttcttccacaatagccaggttcttcaatttgtccacatccacatcacctacatcggctgaatgtgagtcttcttcggccttgcgttgttgttcttcttcttcacggtgctttcgcgcggcttcgagcacgtcaagtttaggtcgcttgcgtttcggggcctccgattcgggggctacggcctcatcctctgggtgatggcgagtcatatctgcacgacgacgcttcattgcacgggcgcccgggagaagatcagccaccatgtcctcctcagcctcttcctttactatattcaggggctggatttcttgagatggcgcttgagtttcgatatcgatggtttgagtggagttgatattggtgtcctcttcttcaggtgcatacactgggacagattgcatgtcgaatccgtcatcgaaggttttcattttactgacgtatgcacgcacacgggtcttggccggagctttcgagggttgactaggctcagagttaggcagatctaccgattcaggtacggcagaaactgcttgttggcttgtttgttcagcctcgaccgcgggtgtagatgcggtgatctgactagagctctcctccgtgggcaaggtacggcagaggggtgatgcatcatttccaaggatagcgtcaaggaactctcgttgctctatcacgcgctggtccatcattagagcaacctcattaccgacgtcaatagaccattgttcgaggtctcctttcgatcgaaagcgaacaagaacgacgccaccggaaccgtgtcgctcggggcccacgcctttctgtcctgctgccttttttataaaccgaacaatatctgcggcagttgtgaccccatcttcaatttcgtagaggagcgccttcccttggccattgttgattggaccttgtaggttttcaaactggcttggatcaccgaaaataaacgtatatccctcaaagacattaatacgtgcgggattgggagcgaaagcagcggcgggacgctgggttggttctttcccggggggcggaaggtgttgatttggatcgggccatgctaattcgaagtcggtttcaagtggacatagcgactcaatgttctcaagatccccgggggtagccgcgtagacgagtgcatcgatatatgaatcatctactatgtacttcccgttgacgagtgcctgaagacccttagctgtattccgtttgcgctgtaccacatgtgttgtgtgatcgacaatataatccatgatggtcttaatgtcgaggtcttctagacgtgagcgaacatgggctagaggatcttcacctcgcacctgcttggaggaggatgacaaggtcagaaccacgggctcccatttgatcctatcaagagcatcagccgggattcaagccaatcgtaagaagacatacgcaccggagcgcatgctggtatttagcgagctggatgagatgctcatcgctcttctccaacttgcattctccttggattctcctctcgtcaacgactgttcctttcttcgagtctaaatcggttatggtgatattggatcgcgctcgtagtgacaactggaggggtattagccagataatgcatatcgtcgcggggagttcaaccgtaccccatctcgcggactgaccggtgagatttcaatggtcatatgcttgcgggatatcgaattatgattgacagcatggcggactattcaataagagatcagccgaactgtgtgatgctccaactgaagtaggccatacctccgtctcgatggaatcgaccgaatagatacctctttccagggcgcagccacacgcgcttccctatgaggctttagcaaccaatcgatccttgtcaatcaaatattcccaccttccagaaaatcaccggtcgaatcaagaatccacatgacgacgaatccgcccagagagatgtttagcgttaggcaacatggctgaggctcacgcaaattggaacgcgtgtccacgtgactccgcgtcaaattgaattccgcgctctcgccttctcatgatcatctaccagccatcgatgggacggtggaaagtatggagtcttcaggtgagaaccccgccagtgatccgaagcctgagtcggtccctgatgaggattttgggaccctgaaatatcagctactcggtccctctttaactaaagcgggccaagattccgtcgatcagcaaaaggtgcgcttgatgattgtattcattttgagctttagctaaactcgcgtttccaggtatcagaaattatatacaatgcctccaggggctctaagttctttaagcacgaacaggatcgggatcggaatctaacgttgaaaatcgagcgaattctaaaagaaaaggcacggctagaacgtctagacttgagcagtgagctacgacgtgccgatgaatacctcgcggagcttgaatcgagccgtgagctctctcaacatgtcattcacgtggattgtgacgcgttctttgccgccgtcgaggagcttgaccggcccgaattcaagacagtgcctatggcagtcggtaaaggagtgctgacaacctgtaattatctggcgaggaagtttggcgtcagaagtggtatggcctcatttgtcgcgaaaaagctctgcccgcagctggttcttttgccgccgaactacgacaaatataccgcaaaggccaaggaagtccgagctatcatggccgagtatgaccctctcttcgagagtgcgagtatagacgaagcctatttgaatatcacagcatactgcgacgaaaatcacttggagcctgatgaggttgttcaacggatgcgcgcagagatattggaaacaaccaaggtgtctgtttccgccggaattgctgctaatgcgaagattgcaaagattgcatccaacctcaacaagcccaatggacaatttcaagtccccaatgaacgggaggcaattatgaaattcatgcgtgacctgtcggtccgcaaagtgaatggaattggccgagtatttgagcgagagctggaatcaataggcgtcaaaaagtgtggtgatatctacccacatcgtgctttattgaccaagctatttggggagaaggctttccaattcctggctcagtgctacctcggtcttgggcggaccaaaattgaacctgtcgagacccacgaacgtaaaagcgtcagtacagagaccactttccatgaaattggagacaaggaggaacttcgagcgaagctctggtgggctgcgcaggagcttgaaaaggatatggcccggactcatttcaaaggccgcacgcttgccctgaaagtcaaactgcatactttcgaagtgctgacgcgccagacagctccatctcgtgccgtcttcctggcaaaagatttgtactcctttgctttgcccatgctcgccaagcttgagaaggatattccgaacataaagctacggcttctcggccttcgctgctcgaatctggtcagcactcagaaagttggaatcaactttttcggcgtagcaacacaaccaaaacccgccaccgagccaacttctgagcccgcccctatatcgacatcggatgtcaatgtatatcatgagatttgtgccgaggaggctttcgaggcggcggctcgccaggaaatacaggacgagatgaatgatctagagcagctgagtcaagagacacccgatgttcatgagccagaggcctctgcagccccaccggtggttgaaacacccgcgatgtgggattgtcctgtatgtacacgaccgcagattgcggatgaccgcgcattcaacgagcatgtggacttctgtctctctagacagacaatccgcgaagtcgtgcaggacacatcagaagaaacatcctcaataccccccaattccagaaaaaggaagttgccatcacaggctggtattcccgaaatggatccaaaacagaagcggctttttttccaatgacggcgaaacttggatgccgctcatcccgacagaaaagcgccgatactcaggctcggaatccagcaatcatttaatattgcagggtcaccgtttttcaaggctccacttgacagccgccagattcgggatagatgtgggacgtctaggggcgagacggatacagggggttcttttttctatgggtgtgttggcaatgacctgccaatcaagggccttgtagaacccattctcacaaaacaatagaggtctcacaatttcctcatcgcaatgtcaatagttcgacgcccttgttcattgaagtaaggaattccacgttgcggtgaagcggcgccctaaacccaatcaggtgacattgttttcgtcactcgactttctcctcgactttctcgactttcccatccatcaggccacaaattccctgttacggaacaagaagacaggcgattctttttattggccggtgccacaatgctcatgtcctgtggcacctcgcaatgccatgacttgcaccccccgcaactatgacctacgataaacaaaacaatggcagtatcgccaaaccgttcacacccaccctcagcgctgcattccataggagtaacagggctcctttgacaccaaaacttgcaagtccaagtcccggtccaggattcccacgtcgcctcgcacaacccgaccacccctattccaaagacgactcccccgcggtcccgacctttctgagcgccaacgtcactccacgatccggtcctcgaaccacccggcgagatggcgctatctactcccccacaaatacttcacctgccccttctccctctccaaatccaccttactcccagtcaacaattggttatggtcgtcgagaccgcagcccggcccgcggggtcaagccggaacaatctcgaactctgaggtcgaagacattgaccgcagacaaccagcctagatcaagattgaattctttctcggatacgacatccgggacccccctgttcttccatgcgtccgacgcacgatcgtcacatccttctgagccatcagatgcccctcgcccgaggccccaggggaagacatccccagcctcgagcttcatatatgcgaacggagatcaagagcgaaaatcactaggggagcaatcgaatgttacatccgcttctgccaaacggcgatcgggtggtcttccccgtcccctgtccgccagcaaaccaccaccttcctcctcgcgcttgagctctcctggtcttccagatgtagcttcacaccctccagaagatatcagattaccatatgtcaccagcattgagagtggactaggaattagcccgcgtcttggctcgccctcgtcgagtacaatcggcgagagaccgcgaccgcatccgatccgacataccaagtcctcaagcgtcgactcaggccgccatggcaattatttacaagacagcttgcgggcaagcccagtcatcgtatccgggagccattttggtgaagaaccagcgcctgtgatgtcggagcagatacccgcccttcgccctcgcatcttcagcaatgtatccaccacctcaacagatacataccctcctgtaccacttagtcctgggaaatccgagggtccgagtgaggcagctcttaatgcgcgtatcgagcgcaagatcatggacttggaaataagcaactcttcactactagccatcaatcgtaccctggagcgcgaaatgcgacaacagaaggcggagcttcggcggttccgacgactgagtcgctccggacgcatatcaatggcaccttccacccgttcattctccggagcggcactctcagttaccagtgagctaaacgagggcgcaagtgagatttcgaacctgtcacaagacgatatgtccgacatcagcgatgaggattcaattgtggatgagagcatcctgagtccgggctcgctggccgagcataatgccaagaaccgtgtcaatgatgagaaacgcgtcatgcttgacttggcgcgacatcaggaggtgctagtggacagccagaagatgaaccaaagtctcaagcgctgtctaggatggaccgaagaacttatcaaagaaggacagcgggccctggagtacaatgttcacgttcaagacgttgagctgggtggccgagtcctagcgcctgaagagttgggcgaaattggtgagagcggccgtggtcttttgagcccttcagtccaatataacgcctctttttctcctatggaggcctccgaactatcatttactgaatcactatatattggaacactatctcctacgccctctatttctgatccgagcacctgatcttatttttggcccttgtctcccggcgggacgattcaattgttttctttcttcctcatacatttgcacaataccctttcttttttgatgcgtttcattttgaattcgtcctttcttcgatcgagacagatattatctcactgttttggacttagcgacttgtactatgagactctggacttacctttcttcccttgcgttcacgatttccatcagacaggatggtcaatgatagacctctatacccgatcatttcatccatcgcgaacacattttttggctatttcgaaagatacccgatgtgcaattattgtcttgtgtttatgttctgtctccatgtgcactaattgatctgcacgcttgaaaatgctagacttctgaccatgttcgcttaatgctgtgttcttcaatatctcatgtcttgattttctagaaaagaacgaccagtcactatggttactctcacagtctgcaactttgaaaatatcattatatcatggtcaacatcatcaagagtctcatatcatggaaatggacactgtcccatccgctgccgacgaagagtctccttgaaaccctccaattccctgtaccccttgccctcaaaatacttcggtcccagatcatcggtgcgatagccctgtgggtaatatttgtccccgtcatcaccaggcaaaggatgtccaagtgcccatttaaaccatgccatcggcccccagcggttccagattgtgggctgcacatagaatggagctccgtcgtatatcaacacccagttgcggccgtgcttattcggtttgtcggtgaaagcgttcaagcgcaagaagtctgggcgtggcagtgataggtatcgcaggtatagttggcggagtttgaatatcaacgcaagtatgccgctgaaaaatgcaggtggttcttccatcctagaaaatgtacacattagactcgctgaatgtggtggtgagttgggatacatacatcatcgcggtccgcaatcgatctcccatcagatatgacacgaagtatctagccaacggcttcaagaaatttggcaagttatataccagcacgtcaatcgtcttttccgcaagctccttgttgcgggggtgtggcttcatgtgctggatttcgtattgctggctccatgcaccaatctcccccagccagtgaatcccatcttggaagccagtctttccagagggcaaagcatcataattgatttccaacgcatcaccgaggctcttccagaatgtcccgacagcacatcgttccatttcagtcatctcgcgccactcgaattgtttcacaaactggattggctcgagagcgaataagctcagtgtgtataacatgtcagcttccatgatcttgccgctagctctgtagcccttgtgcagaaatttggttcgggctattgctgtccgcgctcgctcggagcgtgggtcgaaagtcatgaattcgccgatcagtgtgcctgtgtcggcatatcttttgaatgatattgtagagtctgataactgtgatgtcttcaggagcagtgtggatattgtcggaatgccatatgtctgcccatgtcaacttccagtcatatacatacttggatgggctttgcatacgcggaagagggcaaactgcagtgacttaagcacaataaagggaaactcggtctgcatgattgtcttttgaataacccaggcatcctgatcggacatgctgcgcatggattgcctcgttccgtagcagctatatttactgtggagtgtctgccgtcgttggaaacggagtgaagatatcagcgctaggtatgttgctagccccagcaacatacatagtgtctgcttagacagtgaagcttgtagcaaggagctagatggagggacatcctcggtactggacgtaggtaatgatgccatttataacaaggcgacggaaatcactctgtagatatagatttaggtcttgagatagaaataatgtctattaagatcaattaattgcactcggtcttatatagattccatcctctatgaacatataaccttgatgacgattaatcgtgaagtatattgctgatctcatgttaagacgaccggaccgaggaagataggctgcggggaaatctcacatctcaaatgcataaatttttgtatatgggtgtacatcatgggatattgtgctaaatagaaatacctatgagctgtattcaactgtacaagagagccgtgtagtttcaatataccgaggtttgcaattaaacccgaatcattcgaccatccacgccctctgtgccagtccaatcaaatcttcatgaatcagcctgatcgacaacatactcggtatctcagtcggatggacttgagccagcatcgtacgatatatctatcccttgtctcccctcttttctcgctttgtactcgtgcttttttactgaggggctgccaatttctccgcctcgaaacacaaagcgtccttggttgcccacttccttggaaccctgcttgtctttaagagggtatgatcttcttctttagataatcggggaatgcgagaaatcacaggaccctgttcttgaactttcagcggtcttggcttcgttctctcatccatatcgtctgacatgcctaatagcttgcttatatgtattgtatgtagtttgatgtcgtcttgatcaggtccgtaactatgtacacatcgttatagatacatgcagtctccctctcattttagtgctgttgtaatctcgccagcaccgtctcctccatcccgaacgatgatacctaggatccagacgttcacggcaaagaagaagagccctgcgagaaacagcccaggtacgaaggatgatagtcccaggaattcgagattgtaaccttggtgcagccagagggcctatatagttggtcagagttgaagccctgaagattctggtatcagaaaatcactagacaatacatacctgtccggcaatccatagtatggctgctgatatgcccagagccggtttacggatgagcgaggaagatggtaggtaaaatggaagcaggatgaggtaccagaggaaatactaaacagattagctgcgagtatgacaattttcggatggagtcacatacctgactggtacaaactttgttgaaagtgacaaaagtaaaagtctgcgcaagcatcgtagtagtcaagctcttctttgccaggaccagaggcaaagcaacaaccacaaggattagctgcggaaggaaggccagtgcctcaaagcgagtttcggccccacccgcagcagaaagatagagcagtgtactatagggagagaaattgtggcggtgatcgatacgagtaagatggtggaagaaagtgtgatggaggaacggttgaccgtgctggaggtacatgacgagattcaatgccacgaaactggccagtgctgcaactgtaaacttcacccgggacggagtaatgaaccccaaagcctttgacagcagacccgagccagtcgttacagacccatcgcgctcagcatcccaccaccagagaatggagacaccatagatgaacgggtaaattttgaaatgcacagcaagacccaggataagcccagcaaggacaggcttcttcgtcaaagttgcccagaggagcgccgcaacaagcacaccgagcagtccctccgaactaccacgggtactgatattggcaaccatgggattccacagccaaacagccgaaacgtaccgcagcgcgcgctcgacgggaaattgatagcatcggacaagcagctggacaacgagccatccagcaaggacgtcagacaatgcaaaaagcgcctttccaaaggcgaaagtcagtgttgaccaaggcgtggcaccttcccacgcagtagggagaagcatccatgccaagagcggcgtgtagcggtaagtatcccgagtgtatggcgactcgccctttgcaacatagcgcgcagcatcagtgaacaccatgtaatcgatgtcggtgtatttcacggtggagtgcgcatcctgccagcctccatagacgaggaaaatgaggcggagagctgttgcggcgagaaagactcgcgctggagagtcgaagatagccattcccttacttgccaaaaacaaacactctttttcgtcctttgataacaaccaaataaagaaatcaaaggttgctaggttgtctgttgcggctagctcgcataattgggcggcttgatgaacccctggcggatgtcgtcggggaaaggaaggagctgcacatccaactaatctttttggatcttaaaatctgtagtgactgtgggcatgaattaattcgccttccattccataccattccgcttggtaaatcggatgtttacgtggaagataattgttgatgccacctcgaggctgatatccgctgactcagcatggtccgtgtccacgggtccgagattgcctaatcgggacgagaagtatacctccagggctaggtattgcacccttaacacgggagggctgctatggactggctgttcactgtttatgccttacttaggcttggggtttgagtatagtctatctcttgttggcgtctctcacagctgtacactgcctcgaattcctggggctatcatccttcgtgcctgggctgtttctcgcagagctcttcatagaatgaactgcccaaaccaaggtctttacccgacaagaacaagaaattcccactaatctacgttggaactgcaagatgtggggaaaacgtttatacccatgtctatgtcttcacgtttaaactatgtatcaggcaccggctaaatgcctcgaatttgacgcttctcaaacgtggctacagtgaatctcaatagaagcgtaggttggtaatcctttgaactcacttgtcgcagggatgatatctccggatgtatgagggtcaataatgctgcgatcgaaggttctgcttgaatacaagcagatcacaataaacctcatttagactatgtgagcgggccatgaaccacacagccgcctcaaagcacccaaaacgagaccattgacaaaaggcatgtgcagcgtaagcgagaagtaatcccttccaagtgagacccatcgttacagctcgggcctgtacaacatcactcaaaccccttctgcaagaagccatcgtccaattttagaattcgaccggccaaattgggacaattagatctgataggttagaggccgtcagatgatgtggtctacttctatgctaaaaaagaaataagacaggctagttataaatctcatttaaacctggctatagtcttaacatagatcgttcaattcattagccagagatgtactgcagatatatccatactatctgtgtatcttatataccaggatacgaagatggtgatcccctgcagaggaaacgaagctatattacaaacttcattatctccccagtccgccgtatcttttcatagacatttgacaacttcatcggagcttggtgattatagcgatacatctccttgtttattcttctctccgttgaagagacttcatcatggtcctgggcatgggaaagtatatcaatcgagggcttctcaacccaaagtccgatgagtctgcaaaggtccagaatgctaggtcaccagtgagctcgacctccaaaaagataaaattccgccgccattgcaggcgattctggtgcttctacctcatcgccaatgtgatagtcttggcgattttcctaccggttttgtaagtcgcagtttttacatattctcctgtttgtgatcaaactaacattgccaaacaagctttctggtcgcgattcctgcagtcgcgcaactagttgtcaacaaatcagatctacgactcgtcaatgccgaagtgatgcacccaacggcagatacagtacgaatgacactagaggccaaggtgaatctgaagcttgcactaggcgttcggctcgatcccgttgtcttctacgcatttgtgcgctccgcaggccacgagaatgcatatgcaggaattgagatccccggacaaactatcaagggaaattattcacttaaagtcaccgaccagttgacgccaatcctcaatatgacttcctgggaaacttttgtgagtcaagctgtctcccaaaaggaaacagcattatcactccatggagtgactgttggatatctcggggtcctgaaaaaccacatcatattggataaagatgtggtaatgccaagtgagtcgctcgctagagtggtattccacggtttgctaatcttcgagatagctttaaacaagtttgaaggcttctccatcgcgaacagtacattcctcttaccggcagaggacgatggaaccaatctcgttgccaatattacacttccaaacccctccgtcctcagcttcgaagttggcaccatcacacttgacctcaaaagcggcaatacagacctagtcatcggcaacgcaacggtcaaagacgtcacacttagacctggaaacaacacattcccgttgagaggtgtgatcgacattggtgcgatgatcggcaacctcagcgaagttcttagctcacagggccccgccatcaggacaggcgcactgagcctgacagctgtgaccagatctattgtatctaacggcactctaatcccgtactatacaaaggtcctcgggtcacttcccctcgtggcaaacgtgagcattggcgacgttcttagaaactcgctcactcatctgggctcgagtgaaacattgtcagacttcgatgacaaacgcaggagaggccctgtacagttgggtggcccggttggatacggtgtcgcgtataaccaggtcgcaagtctgaaacacaacagacacgttcaaaagatgttcgaggatgaagatcccgaacgacgagacgcaattatagaatcgctggctcgatattatgcttcactatgaatgtacacttttacttcaattggatttaacaatacctcagtgacagttttcttcctgaattaaatcttgatatctggttcgctaggggtggatcgaccattgaggcaatgagccaatagtggtcatcatcctagtgtccaaggatgaatgaagctgttgtggattaagatcccatttttgtgccaaccgtatcatgaaaaacgagaaaaatcagaaatcctacagtacattgagatccttgaagcattgaatggaaagttaagtctgtcatacgttcatttccacatatcccctatgctaacatgctgagaattcacacaaacaaggcaataatagagttgggaagagaagagaagagaacaagatttcagtagtaaagcccgccatttgtgaaaaaaacagggtccggcatggcatcaaaatacgtcgattgttctccgaatttcagacctttctcatgatccggggtcaacaaagacatcgtgtcgttcctctcatcaacatcagcggcaatccccggccacaaattgttgtcactccaactcagatactcccagagatactgggcccccgaatcatccgtgaacggggtattagcgagggggtcaaggaacccattctcgcccatgttaccacgacatgtattagacgccgcgaatatgagcgacatatcccgatcagcgggataagagccaccaaaaacgctagcggaagaatcaggatcagcgaggtcctgcccccgcttgctagcctcgtagatacgcgagatagcatccagcgatcgcttcgccgtatggccaaaggactgcatacgggccagagtcatcatagccatttccacctgtacttgacaggactcaatggaagcacgggggtcatttaccgttggatcgttgaggaacaatcccactaagggcaccagagaagcctggaaggtccaccaaacagcattccatccgcacaattggttaagctgcgctgtagcggcaatattccgaatagattcttctgcgacttggcgacatttttcaatcgcagtgcgctcctcggatcgcagtgctatataaggcacacgtcgcatggcgtagttgagcagtgttggtcggtacaggaggatccgctggttataatagcgccagcgcattactgtgcggacagtttttattgactccgagcagggctggtggtctttcaggacggaggggaggttgtcccaccactctaggagctgtgcatctgcgtgggccatttcttggtgcttgactagcggtgctgcggcgagggactcttggacttgggttgcgattttggcgaagcgaatgttttccactaaggggaggatctcgaggacgtttccctattagaatgacattagtcaaacgatcgtttttttttttctttctagagtgtaacagggcctaccttatctcgacatagagggggtttaactgtaatgttcgagcctatccgacccatactaggtcggcctagcgtcatgccggcccaggtatccatgcagaacaaagaccaccagacgcggcgcttaagatccatggaggctagcttggccggactcgatatttgatgagtctccgtaaactccttgtgcaatcctagggcagccgccatacgcagcgcggcacccataatggagtatgctagattcggctgactgatatagtgacagtaccagccccccatcagtcccagcgcctggatagtctcgatatgggagcttcccaaggaactcagagttaagtgacccttgaatcgcaggaagtatgtctggtgtgttacatcatcgggtcctgtagcagcaatgcaaccgagagcaagaacaatgttcagcagagcaagccaatggtcatctctccgacgaccagagcagtaagcctcacggaaggagggctcatcgatcatgggagcgaaggcttggaaatagaggaaatatgcatcgagcatttgcatctctgaaggtggaatagggggctgtgagggtgtgggaggcgcaagatgcggccatcctatcgcattttcctgttcattcacgggcgtacgcgaaaagtacggggcacagcctggatccaaccagacaataaccttgatcacagcctggatagatgatacacccaggtaagatgaaggttggcgagccgacagcgacaagccattaacatcatctgagacgccctctactagatcagaggagctagtattacggctatcgggtagttcctcaggcatagtttgcagggcctcgaggttgtcatcgtcattcgataacggtgagacatgggcttccagcgaagccgatgtcgatggtgaatcggtctgatgtgacagtgcttgcatatgagagctcgatggagtggttatgagctcaaggagtttctcacgtggcaaatttgccaatgactctggagagaagttggggaataactttcccaagatacctcgatactcttccagggtggtagatagcttttctacgtgtctgtgtatattaaactggttagatggttggggttagaataaagcaatgggcaaggctcacctccgtgatggccgtgggtctgaatagtggcactggtctgacttcttataccaccgacatgcctcacatggcttctcgccatcacacttgatcttgcgatggcgacaagatgtacaagcgcgcaaggttgtcacacggcgactaatggaatcacgcctttcactagtggaccggttacgggcaggagttgctgccgtaggattttcgaaaccctcgaatgtatggaacattgctgatgctatgaattcacgaccaccgtgtggtcaatgagtaggccatatggatcagtagaataagagtgtatgatgtttccgttgaatcgagacagttcttcacattgtggaaaggtggcaagtcatatgtgcaaggagatagaaaaaaggttccaagcgaaaacgccgattaagaaaaagcagggtaataataagaaaaaaataggctgatccgcataaatatccccgcattttgttggatttgaacgatgcaagtctttttataggctagtgatctccgcgacaactgaggtttcgagtcccgacctgcctaatatcccgggaattgccacgccagcatgaacaggggtggcagatttgctatacagaataaatctcttccttccagtattcaaacgccacagagcgtgcatggtagggtactcggcactccctggtgtggcatggattccccgaagtgaggggcaatttccccagactcactttaggaaatcatcatgagccctgcaagatgggactagacgatcgtataggaagatcactagctctgcatgtccgttctcgcatggggtccagtaccaggcaatttccctttgaccggattttccaacctgtttcgccaatcaacgtgtcaaacctcttcttagcgccatgctccgtgtgctccggagtacggagtataccataatggctctaagcccgacgccgaggcctggaatgagggattttcacgaatcaaggagcaggtgctcatttccacttatgcttaccccgtgtatcaggaggggcaaggtgcgacggcacatctcgccactggggttcggtgccgagatactttcgcgccatgtctctttcgagtcaagggcccgaaatggggacacgaacggtcaggagttcacgccttattttctcttattctcgaagcgacaaagaggccaagagagtcaaactcgaaattatttaaagccagcactgtgcagagctccacgttttgatcattgatctccggggaaattaccggggcatgccaagcctgtgggatgaaagggagccgaagggtgcaggacgcccgttgcctgccaatgttcaaccgtcattggttcggttgtgactcttgtgacgaacgatgcatactaacggtaattggtgcaataataataagttcgatataggcagtgtcatgacctaaaaaagctgcctgcgcgcggggaaggcagatggtatgcaggtccatcagtccagagagtctgcaagtttatgatatcagaaactgatggaaagaaacccgaacatcaacaatgcatgttatgttgagcttgacgggaccttttccgtggccaacaaagctcttgggtggatataagaaccccaggggttgacattgctgagtgggacctcgggagatatggttgaaattttgccgttttgcaaattctcattctttcactgtatttgcagaatacaagttgcaaatatacaggtcacgtgccacactagtcccttttggacacggccaaaggaagtctccgggcttatcgataaggacaagtcggtctccacctaactatccatggatgtataagtccggggtagaccaagcaacctcctgtatattgccaattgcttttcaaaatggctaagatcatacactctctttcttctgactggtccttcaaggatcgggacaccgacgaatggctgccagtggcttcggtcccatctgtggtacaacaggatctcattgctaacaacaagtgagctgggtttgttagacgaaacgtttcaaatctaaaaggtctctttcaacaggctcgatgatccttatatcggattcaaagaattgaacgcccgctgggtcaacgagaagacgtgggtttaccgaaaggtggtggagaagccatccgtccccgccggctctgcaattgtactggtcttcgacggtcttgatacatttgccaaggtcaagatggatgaacaagtgatcttggagagtgataacatgttcctgggccaccgagtggacgtcaccaaagcattggaagcagaggacgaacacacgctcgagattgagttcgactgtgcactcgtcaaggcacgcgagctccgatcccagcacacgaaacataaatgggtcgggttcaatggtgatctatctcgcttggctgtgcgaaaagctcagtatcactggggctgggactggggtccagtgttgatgaccgcgggcatctggcgtgccgtacggttcgaggtgtatcaagctcgcgtggccaatatttggccccaaacacagctatctgcagaccaccaggcagctgatgtaacggtcgttattgatgtggagagtgtcggtgatcgggaatatacggcccagtttagccttggcttaaaaggaaacgagattgcaagcaagactatccctgtgtccgagagaacaactcaagtaaaattcccagtcgacaaaccggctctgtggtggccccatggatatggcgagcagactctgtacgacatgtcggtgtcgctacttcgcaatggtgaacaagttgaccagacatctaaaaagtttggtatccgggccgccgagatcgttcaacaaccggacaagcatggcaaatcctttttcgtccgactcaatggaatggacattttctgcggcggttcgtgttggattccggcagacagtctactccctgctgtcagtgctgagcgataccgcaagtggattgaacttctggtcgctggcagacaagtgatgatacggtaagttttgttttcctatgtgttctcggatgtggatttagctaacgttgaacaagtgtctggggtggtggtatatatgaagacgactccttctatgaggcctgcgatgaattgggagtactggtctggcaagattttatgtttgggtgtggtaattatcccacatggcctaagatgctcgagtctatccgtcaagaggcaatctacaatttggagcgtatgcgccaccatccttcgattgtgctctatgcgggcaacaacgaggactatcaagtggcagagtcagaaggcttgacctataactacgaagataaagacccggagaactggttgaaaacagattttccagcacgatacatctatgagaagctgcttccagatctggtggctaaatactcacctggcacattctatcaccctgggagtccatggggagatggcaagatatcgtcagattccactgttggtgatctacaccaatggaacggtcagtgttctctaacaaatctcgaatcattgcgctaatcactagaatagtgtggcatggaacgcaggagaaataccaaattttcgatactctgggcggtcggttcaacagcgagtttggaatggaggcattcccccatatctctaccattgactacttcgtcgagaatccagaggacagatttcctcaatcccaggtgattgacttccacaacaaggccgacggtcatgaacgaagactggctacgtaccttgtagagaatctacggtccgccacagacctcgaggtatgaccacccgtgatgaccaccgatgcaggctaacgtctccagacctatatctatctcactcaagttgtacaagcagagaccatgatgtttggctaccgaggctggcgtcagcaatggggcgacgagcgacactgcggtggtgcactgctctggcagctgaacgactgctggccgacaatctcatgggccatcgtggactacttccttaggccaaaaccagcgtactacgccgttaagcgggtcttgaacccgatcgccatcggggtccgacgtgagcaccacgactggagcgtgtcacacgcccaaccggccaagaccagcaagtacgaactttggatcgccagcaatcaacccaagaccgtacaaggcagtatcgagctgcggttcctatctgtcaacacaggccgcgatcttcgggctccgatcgcgcgcgaaaatatcaccattgctgccaatggcaccacggacatcatcaatggtgttctcgaccacatcgccgagccagaaccgcatgtcctcgccgcccggttatgggttgacaaccaggtcgtagcacgtgatgtcgactggccacagccattgaagtatctcaatctgtccgagcgacaggtagaggtaaagaggcagacagggaaatctggtgagacggtgttggtgatcagtgcctgcaagccggttaagtgtcttgtgttcaaggagcaagagggtgtacagcttgcggacaacgctatcgacattatccctggtgatgagcagacagtcagagttactggccttggaagtgagcctctaaggtaccggtacttaggacaagtctcatgcgaagtggtcgaatgagtggctactacctatgctatatagcagtgggcaatatgattataaggggcagaagcacttcaaataccaggcataattctcatgaatatcaatagatgtacgatgtagtacatattagacaacgactaagagacgatcatctcatatcttatcggccctggggagatctgaacttaacaacctccaactttttgccaatgggtaccaaacgcgactgggaaggccagccacttgagctgcatcctaaagatacaatcatggcagaagcagagtcagctccttcaatcctgtcaatctttgagaacttccgcgacgagctggacgagcaccatgaccgccgcgagcgtatcatcaagaaaagccgcgacattaccgccttgagcaagaagatgtatgcctccacttccagctcaagaagagcaccactaactaggattcttttagcatcttcgcccttcaacgagtccgcgcaacgaaccaacccatcccacctaaaatcgcccaagaaaaccaaacccgcttcgaccaaatccaggcactgttcgaagctgtcgtccccgaacaattagggataaatggctggcgataccagcgccaaatcagccctggaatccaggaattcatcgaagccatctccttcgaccactacctacgcacggaaacgctaatcacgcacgccgagtgctccgcccgcgtcccaccacaaatactcatttcagaagaagactacctactgggcctgtttgatctcacgggagagatgatgcgcttcgcggttctatctctgagctccgggaatacaactgctacccaagtgaccaagaacacaacaaacgaaagcgagaaatcgccggtcgctgcgtcccagggtggcatcgtggttgatctacgtgctatgcgcgcaggatttgaggcgctcagtgtgccacagcggcattacatgttccgggatatggcgaagaagctggatgtgatgcagaacagtgtggaaaaggttgagcgggcggcgtatgggattgtcgttcgtgggagtgagaggccgagtgggtggacgcctgatctgtcgggcgcgatggaggtggcatcctactaggaaactacgtatcatgaagtatccagcaatgatcgatggcttattttgattgacagcgtagtccgttatagttcggggggttgcatggctattcatatgccaggaactatacagaacttgacaatcaagtcttctcccgcttgatgtcttaatatcccctattaataacttactccgacattttatgacaatcgcatattccatattgacattgctgtaccgacaggtgcgtcaccgtgacatcactagttcagaacggtaaagaccgtagaagcccgttgtagggacaggttgggtgtaaaaggaaaagacaaagcatttccaattgcaaaaaaacaaagcaagaaaaacgccttcgtaaaacgatcgtgtcacccatatcccatagcaccaagagccaaagttacggccatgttgactgtagacggccaaatcagacgggcgagcgtgggttctcatcctcggagagaataccctgcgaaatcaggtcttccggctgtggccggttctgaatcttatgctcgaggttatcggccagcatgtgcttctcgagttcacgggcaggggcctgcagcgctggggcagcggaggttgcggggaggatattaccttggcgggttgttagtatattgagaggaactcaggtaccaatctcaggcacgaaatgaaagtgaaaaaatgggaaatgggaaatgatctatcgaatcagaaggaaaaaagaaaggaaaacaaacgctcaaccaactcgtccttctcaggcctcttctccaggttcttcttcagactgtcagtagcacgctggcggtcgagcacctggcgggcagattgaatcgctctatccttgtgttaacgatcatatctcacgagactcatgggactattcccgaagcactcacggagctacattggtgtccagcaggatgtggcggttcttgaggtcctgcatttccgggcgggtttggaggtgtttctccagcgagttgcgacgctcgtaggttgggggaagtgactgctgaacggaggacattgtacttgtcgcaagtaatgatagtcaaagtgttgttaagaagtggaatcagtcgaggaatggagaaggcgaaagtcaagtggtggtcccgtgggacaatcacgcggggaaagcggcggtctatacatcgacaccatatcaccgtgaaactacaccaaagggaaaatatcaagaataatgcaatttactgggataatctaggataatctgggatgctagtagatcataaaacaaaaaaatacaatccaccttcataccatctcccagcgcaaaacagaaagcaaccgtctcaacgtctccgcaatttgacgatctcccatctccgtctcctaagaaaagggtgaaaggggaaaaagggggggcacaggttttccgaagtagacatatccaagcagcgcatcacagccgcgggtcgaatccaccaagggattcgtgtcttttcgtgtccgagatccgaatcatgccggggttctgggatcgtttatgccagaggaagagggaaaagcgcactctgcaggcaatcacagcaagacagatccagatccagatccccgcattcgggggtttattgcagtccagcaaagagaaaagagacacccctgtccagttctggatgcattggttcacaaaacactccagtctactgtcatcaagagatgatttgaaggtagactgttctgctcatgctaatcaaggaacccagagcttaccccggccacgaccattgcctcgtgcaccgcgcgaagatccaccacggcgactattggatgagcggcgagaggccccagcgttaccacgggcagcaccggtggcacccgcaacaccctgttgggtactcaagtctatagtggtcggcttggttgcgccgcccagagaccggctgaaagagtcggggtctatgggcttggtaggaacttccacggtaggtgtaggctcagcaggaggtggcgcagccttaggggcagccttgcgctgacccccaccacgcgaagcacctcgagtagttccttttccacgaccgcgggggacgaaaactagctcatcctcgtcgctctcttcctcgtaggacaacagagtcttcggttcagcgggctgggcctgagttttctcgacgtatttgcagcggtttttgtactcgcgctcctcgtactggatagcggtgcgtagctgcagaatgttcttgacaccaatgccaaacttctgagcccacacctgggtcgcacggtcattggagataagaatgcaggtcttggctgaattctcggcatcggggccggcatgcaaccgccagagcagagcgctcagcaatgggcgcagagcgggcggtgcggtcgggatgacggatccggagatggtacgctggtggttagaggacttgctcttggtcctgtcattctttgttgcttcattgccggacccgtgctgggcacactcggggctggtacgggaactgcgagaggatgtgcgcgatccaggtccactgggggtgccgacggaggtgatcgacaccgtctccgggtccttcttgaagttgagcttggacaagagcatctgcgacaggtcatccgactcgttcttggtcaaagtatcgcgggcgctagtttcgatcgctggctcgtcattgtatgtctcgtcaactacctcgggctcctcttcgaattccggcaggaagaatttctcggcctcctcccagcgctcgtattgctccatggggccctggagtagaactcggtcggcagcgatgtggtctttgccggaagtgacccggtcaagaaagcgaactgcttcgcgcgcattgatggcgatctgcgaccctgctcgcttcagcgcatggagtcgttcaagtgctaattagaggataatggttagaccggcaaacgctgcagtgagacaatcaaagtctcttcaacattcgggtactcactgtagagaggaactacgagatcgatagccccattagtagtccattttttgatttcgctaatattggtggagagggccgtctcgtccacggcacagcggaagaccttgcgtccggtcgacatggcggataccaaacgtactcgttcgtatgttggtaaagagtgggagatacagggcaaagaccaccctatatcgcaagactagaattgtagacaaccgcgactaaatcggggccagggtcagcacgggcctagagctgaggaaggaggtttgatgatggagggacctgggaatgtggggggggtaaggggagtagtgggatgtcggttgatagagccatgattttcactcacgatgagaatccagttgacaggatgtttccatctgcagcatctttgtaacaatacagtctgcttggggtcaaagaacgcaccttgagaaatgatgcgatgggcagagaaggaaatatgctgactaagcgcgttataggaacaagacgggatttaaagagagaagtgagggtttctatatatcgaagagggatacagtctaagaataggaagagaaagaaagaaaagatcatgtttgtgaaggaaagggttccaaagccatcatcccagcctatgacttcaccttcttgatgaggccgtccgattccttcactcgttgcgcccactcactggttttgatgttcatattagtactagtagcaacatttgaagtacaagggaaactttgttatacttacgtccaactgccgtcatatacccgacgcaggtttgggtcgccatattcggcctcactcagagctgtctcaatgatggaggcagtcacgccagtaccacacgagctgataattgtttggtttggatccaccttgtggtcttcaaaaacctttcgcaagtcttcaacggggagataggctttggtttcagggtcgaggagttcttggaagggcaagctcttggagccaggaatatggcccgaagagaggccagggcgcggctctggatcggttccagcccagcgaccataggagcgtgcatctaggatctctatttcctctgcaccttctttgccatagtcaaatgctaactccttcatctctcggaaggagatcactagtcgcgagtcgtacgtcggaacagagtacttcgacttctccaccaccgctggctcgccgctctcagtcggaagaccgtctttgatccagagacgatagttgttgaggatatgtacattgggatggccgaaaacacgaagggtccagcctacacgcggcgcactgaatatgcccagctcggcagtgtcgtataccaccaccgagtcgtcgcgacggatccccaattcgctcatggcctcggcaaaggtctcgcaagtgggaagcatgtgtgggtagggtgaatcttgatctttgatagcatcaaggtcaaagaatcgggcctgggggatgcgcgagttacggaacgagtcaattcccttgcgtccctctgggtcgttcggcatgaaccatgctgcacagagaggaatcacgcgcggggaagttgagatctttgtccggggattcttcttgagtgcttcattcagctgctttggggtcactagatacgaagaaaaagagacattgcgctgagtatggagccctgtggagaccgacatgttggggcggaagagacgagcagaagcaaaggatctggcagtgaaagccatggtggagaggaaagaagctttttaaaagaccaatttacataacgaggtagcaaagactcggggaaatatccaaatgcaagccagaccaaccacgagtaagaggaagcggaagagcagggaagagcaataagaggagtactattgcgtgttatggcggcatgtgtggaggtgcggagagtggacatgtgataggaggctgataggagagataagcggtgttgaccgatgctttccctctcttcacctttcttgattctccactatcccaccccacaatgaaggtcgctattaaagaatggaatgccgtcgctacttggcattggaatatccccgaggacgaggtgtgtggcatctgtcgtgtccagttcgatggcacctgtccaacctgcaaattccccggcgatgactgcgcacttggtgagtgaacctttgactcccaattccatacggaatactgaccacggtgattattatagtgcaaggaagatgtaaccacgcgttccatatggtaagactgcggagtgggcatatgagctatccctagactaatcaacactttggaaacagcactgcttaatgacctggattgacctggaatcttccaagggactatgtccaatgtgccgacaaagtaagctttactctgcattgtctgtgatatcgagctaactgtctccagaattcgaatggaaggacaaggaataacggcccaatttgtgttttcttcttctcatcaatggttatcaaggcgttgtcggacgaattcaagataccccctttgcatttttgttgggcgccaaattagattggaggagttggtgggacctcaatctcaactgagcatcaaattaatcccgtggttggagcgacttcgattaaaccgagtttatacttcgtattcgaccttccatttgtcgatatatattgttgcagatcgcgccatagattagtcgactcatacaatacccaagccccaaggagcctaccaactaccatataaatacaatcaccatgaagaacgcagaataatcctaacgtctcagggtgaaacatgtaccaatatcaaagtcgcttgatcccctcggaaggtccggccgttgtcgtctctcgtctgatcgtcacgtggcgctatcgataagaagctctccgcacgcgatacagaacctcgtcctaacctaagctcctctccagaatgatgtagccttggcctatggagatgtctctgaacaactctccctatcatcctcccctatcctcttcttcgtctaggcagtccctgcacaaagaagcactgtttcgaccaggcaccgcctcttcgcggccaagtgatcgacagtccagagggcaactgcctgagggccgcccatcaacagacgaaactcatcaacccccgggaacaactgccttgccctgccaagatgaagctctggatgagaccgaagatcattctgaggaaggccaagaaaatctgactcatcccacattccagccgttcttcgccttgattgaagacgcccatacctcagactaccaccacccaacagtccactacatattctccgacgatgacaccgagatcgtgacagaggcagccctgcgtagcttggccgcgcagcaagaagctctttccgattccaagaaagatcagatcgcgcagacccaatcgtccactctgcaggacgagatgaaagatccctccgacccggacctagccaagtccaccctactcccaccgtccgttccaggtatccgagataattatgtcattctcgacatagagccctcaccacacacacctgacgtagggcaaactagtcctataaccgaacaactagcaccgggcaaaggcgggggcggtacaaggtccatatcctcgtcaccggcgaacccttccgtgctcccacaggatcaggggcagttacacccgcagtatcgcgttaccgcggcgcagagcttctcgtcaacttggcaggttctcagtacggaagtggcgacggcgcccacctttgagaataacaattccggcgaatcaccaggacaggggttgatgctgaagatccgtggcacaggtggactgccgattgaggtaggtaacacggagaaggaccgtacactggaagagatgatggaccagtttgcaaagcggatgagcgagttgcaggttgttatcgatgctgcggaggccgtggatttgaaagaagaatataccgaagaagaagttgtgcaacatcctttctctcaagacacagctgaagagactacccagggcgagggggatagtgctgcatatgctgcaaaggttgaaggggaacattcttgatgattttatatttgctgtttttggcgcattgtgcggaacatcggctgttgtactaagtctagtctattaacaggctagaaccggtaaaccttatgaatatatcttgaatacaagatgaatcaatccaaactaggagatcgggtatgatattaagatcaaatttgacatcccgataagaatatcaatgtagttgaaccggaaacgccatgtacagtcgcctttctatggaactcagacaaaagaggagatagaagagaatgtccaacccaacactgttttctcagccaaaaactccgacccagagtggaaagccaagcgactatcgggtatcaaaaatcgacaagaaaggagaaaaaaccaaaagcaaaaattaacatggagtccacctaatcagaggtgcggtttctgaaccttcgactaccggcgatggctgaagggggcatattttcgcgaccctccttcatgccagccatcctttttgagagcatggttttggggagtttagtcccgggattgttggttgagttcgagcggcgccgtttgcgggaaggttctggctcttccttttctggcgtttcgtccaggtccaaggatgtggccaacgcgggggtttctggtttgatgggaggtagtacgtcctcaccatcagacacaaccggtctggcgacgtttaagtcgacttccctaaggccagtgttggatggtggagctgcgaatgatggaagagagtggcctacctcttccggggtatcattatacacgaatttcttggacggtgaagcatgtggcgaagtgggagcaggggaatctggttgtcccccctcactgaatggcagagcagtaaactgcttggatgtccggtgtcgagtgcgaagaccgtcgtgagcttccgtttggggcatttccgaagggtattcgtagcgtcgtttctgaggggttatacctgttcgaacatactctttcagggggcggctctggatgttggaccgcatttccaaaagtggctggcgcacttcagcgtgtaggggtgcagtagtttgttccaggttcttggtaagcatatcgacatcctcctggagttgctcgacgtgtccagtgaacgtattgagttgcccatagacgtttgagcgtgactctcggaccgtattagccatggtattcaaactgcctaggtgtgattcatggaagcggccattctgggaccgtgctttggcaacgaagtcatccaaagcctccatttgtgtgctcatgtcgctcatctgagcatcaacaatgcgcacagtctcttggtgcacagattccgttgcccgatgaattgaggcgttgcgctggtcgaaagtctactgctattagtttcattccgcaacccaaggatgtcagtcggtcttacctcccagtcattctgcatcctggttttgatttcatccttggatgcagtaatgtccttggcaaactgctcctccttgaaaatccattcatcaatgtgcctgtcgtgctgcgcagtcgcttgctcaagagagtcgcctgatgccgagatgtcggtgcgaagggtattaaatttgccctgaaggcggttgttctgtttcaggcttgagtcctcaaggagtccccggatgtgagacataagagtttcgcgctcgacttgtgcactcgcatgttcctcttcgagaacctgtgctagattgaatgaagcttttctattggcctccactgtctgacggttagctgcctgcagctggagacgtagtctgtggacttcggatttctgttcatcgatgtgctttgccatgccctcgaacatggtcttgaagtctttgccgagtgtgctgtatgacgagtgaagttgcgagtgaaactctgagaactccccaatgacctcttcggagattcgagcagcagcagccgacaagccattcaggccttcgccaactttggacttaacctcttctcggaggaccttgatctcctcgagaacttcattcatcttgtcccgggcagtggatgtgttattcttggcctcggcctcagcattgtcaaacgatgcatcaagatccttaaggtgggagcgggtagaccgcacagtgtcgagttcatggtctacgaattggtggatcttgctagacatctcctcgagcagcttcgcatgctgcgtctggaacatctgcatgcgagcatcgactcgctccgtgacatgcgatacctcaccggttgaagcctgccatgttttttggttatcagtctccaggttatctttgcgatccagtttcgcgtgcagtccattcacgtcttgaatagttccatttaaggtagtcaccaggccggcaccaatgtgacgaagttgcttttccgtattttgatgagccttccgcacaatcttctcctcgtccagcttctcctgggtatccttccaaaacctttctgtttcgttgagcacatcgcgcgtttctttgagtttggactcaatctcctcattgtcatgctttaatgagttaaagttgcctgtgatcaaaagtagctcttgaaccttgtggcgaaggcttgcctccatcgactcgatcttggcacgctgttcctcgttgacgatgcggcgcgactcactttccatcgtcatttgttcaaacgcatcaggcgtcatatagacaccattgcgatgccgggtggcaatgagctcgcttttgagcttctgaatttccatcccgatatctcgcagaagcttagttttggtgattatagaattaatctggggtttgttgcgaatgttcttggctcgaaaggcataatcaagggtagatatggtctcgtctaggttgcttcgggcaggcgagacggtggcgatgatgcatgtttttgtttgccctccaagtgaatcttgtagcagtctcgtaagtttcgactcgcggtaaggaatgtgggagctcttatccaccagagcgttgatcaccctcccaagagtgagtagactcttgttaatgagacctgcctccgtcgcccgtttattttctgcaccgctccgtccgatattttcgctacccgcgagatcaaccaggttcaacttgcccgagctgacatagtcctccccagattcggtcgtgcgatttgtgagcacggtgatggtaaaaactgtatggcttcgggaactcaggtcattgcattttgtcgctgccacttggcgtttatggctgcccgattgaagtaatcggattccggtggacgcagagtcgatgtaagtctcctccatgccctgaaccatggtgccgtgtcctcccttcttctcattttcgaaaatcttgagcttggtgctatcgtcgtatgacagaagatcgcgaagttcttcattataaagttcgataaaggaacatttcactgtgctttctgtgtcctccagcttgcgaaagagggcgtaaagcgtacgcggaataattcctgcgtcgtcggagaggatgcccaatgtgtcattcatgtctcctgacatggtgtatgtctttcctgttccagtctgtccgtaagcgaagattgtgcaattgtaacctgccaacatctgcaaggaattagcgcggtcctttgggttcagtcgcggcgactatactaacctcgtcgaggaccggtacaaccacatcctcgtagacagtagcttgatcggcagccggggagaagaccttgtcaaaagcatatgtcttgtttgaaaccgcgttcggtcccatcgagagatcgagggttttgcccttcacaccctctggtgttgacaagactacaccgttattctccttaatctcgcgatcactgcgaccgcgacaccggactaccacatggatgcttgtgtcctcgttgatttcccgttcgaaatctttctccctcctcttattcgcagcgcccgatttttctgggctcctcgccacacgagctgcacttatcgcagaggacctcactgatggcgtagacactccaggtagtgcatggcgttctggggctgccgaacccgctcgtcgaactggttggcgcaaacccgacctcctcgtggtggggagggtggatggaggccttggtgggccagccatgttgacaatgcgacactcggaatgtaattgtggtattatttagcagtaatattcgagggtccgtctgaaagttcagttgatcttttgatttgatattttcacaagctgtgtcggagtctttcacggttgtgtatatcagtggagcttcgtctcaaacaggagcaacataaacaaacattacgtaatccaatcatttccccctcgcacatgactcggttggtcggctgcgctatcgtcatcgctctcttatcgttatccttccccctcataccgtcccttacatctccagagcctccccttttaactacacaaagctcgactatcgtatggacttttgtccacccatgaacaccgggccatgaaaacgaacaaaccatcatgactacctcttcttcctcagcccaggcgcaaatcttccctgggaaaggactggggtttatcagtatgtttctttgtctaacctcgcagccttttcagcagctctcgctaatactcttgaagccttgggtgcttcgctccaaaatgtccttacccgcgtcaagtcctatccccaaacctatcccgccatcgacctagcctactcccccgcagatccgctccgcaagccggtgatattgcagttaccttcaaatggcctgcgccttcgatttgacggtcccgaccagaggctccgtttgattgaagtagtcgacttctctcgagtaaacctggtatacaaaaatcaggatgtgctcaaaggtgggaagtcagcagaacaacccttgtcctcgcacggccctagcttccggcacgtctacaatcgcttgtttggcccctcatacccaggagaatacgtacccccggcagacccacagtcgccatatggaacctacgtcctttcttatccgggggttgcattctcgtttccccttcagcactctgcctggtcagatcagtgtgattttgtagcgttgctatcttcctcagctgcgctcccggccacatccatgtcgatcttccaaggggcatcatggcctgaggcccgaggcaagttgttcacacaacaggcacagtacccacgctcgtcggctttgattggaaaatcccgagaatcgctagcggatgaaatcgaggagtggcatgtcctaggtgctggggaacttcaagtggctcgcaggacgggctctccattatacataaaactgggggagacgactccccaggacttgattgcagacttcggtccacccgacgcagtctaccgtaagaacgaccgccggatctcgatccaccgtgcaactgggggtggggaatctcacctgagtccctctccgggcagaggaatagacatcccggacggcgaccactcatccactaacagcgtaactgatgattctgacgaagagttggctaccttcaatatcggagaccccacctcactgcccgcagaatgctttttgaactacttccaccatggattcgatgccttcatctcgtatccgactacacctggacctgctttccccgcctcgggtcttccagatccatcgcctcagccaccatcctcccagctgacagtgacaaagattattcttcatgggaacgtcccaggttcttatccatttaatcgtcaccgccgaagtcgctggttaatctcgttggatgaatctggcgattgtctgacttcggaatcgacatacgatgaaatctcggagcggctgcgggctacttggaaaggatcttacgccagccccgccgaggagcgtgctctgcagcggccaatggtactgaaccgcggctggggagacagccccgagagcagtgttgagttccttggtggttgggaggagaccacagccaaaggtcctcggaatggtgccgatgggcaggatggaggattaggtaataccgagctttttgggttcccggggcttttatttgaagttctcaagaatggcgccgtgagttgtttgacagtgtactgatttaagactattgcacccagcgcttctcaccatatctcaatgcattatgaatcatgataatcctggcttggtatgttttaatgtgaaactatatgtgaccattcaaaacctggattgtagatgtaaattgtagaattgatacctaatgtccattctccaatagcctcgcaatttccgtttgattcaaatttcttgcccactcaatgactgtacaaccatttccatcctcgatgttagtatccgctcctcgaccgagcaagaaccttattgcatccagtttcccaagctctgttgctatgtgtaaaggggttcccaaactcacaggatagaaccgcctaaaggttggataatcctgatacattgggacgttcaaaggggcacctttatcaataagtagcgccaacacttcattgagatttgtccgccgataaatggcatattgaaggagctgtccctgttgtacatcacctccgcggcttagcatgagctcgatgatgtttataagagctagctggacagcataagatagcggagtacagttaatatcacatcgttgattgggatttgctccatggtctagaagccagttcgtcatctcttcctcgtagattgcatagctatggtaacgagttattattgtgtttcttttcaagaaatgaaagcaagattctcatccttcgaatcactgactttagaacggggggatcaaggtcacttatacgttcattgatgtcccatcctttttgcatgaagcatttgagcgctttcttcgatttacatttcattgcttccaatggaaaatatgaatgtatcgtaagcccacggtcgagaagttctgaaatgaattgagtattgtcttgcttgattgcctctaccatcaccgggacaagttcctgtatgacatgtttcgggctcgagggcagtagagcgatagtatcattgaaggattgtatatctcctctgaagcgaaatctgtcaactgctcggttgtttctttcgggatttgacgtgggatgtgaaattgatttaactcgatgggtgtaatagatgagataggtggctcacacaaccatgatcgaagatccatgataacacacaggttatctgtgagagcaaaaatgaagtctcctaggaggtgtgagatgtacgacctcagcggggttgatgatgtacgacaggtctcgcagtgggcttttgccatcttcccccctctaagagatcggaatctcgtataactaccaacagtaagcgataatagatatgcatctggccctgtacattgaccgctagttccccgttgatttgtttctcttcctataaaatcctacaagcagaaattatatcccttccactcttactcctctgaagtcccgggagatttggtccctgtctctactccatcgattgttttctgtttggcagtgatcatgtctaccgactcagcctcttggactactgtccaggattttctgcaaaaaagtgatagccaaactgccgagtgttttcgtcgaactcaatgggatgagctctgtccaatcgcttcaggtcttgctggacacttggagtgcgtggccttagaccaggttgctagcgggctcaatcacattgtccgtttgctaaaattttccgacgagactcgctgggcggcccgggttcatattagaaggagtacctccccccttgtcagcaagaccagcctcagaaacgaggttgcgacaatgcaattcatcaaggaacgttccgtcttgccagtgcctcaagtttttgcgtatgaagttgacgagaccaacccggtgagggttccttttatactgatggagctgctccctggtagcgtcgccatggacgccctaggcggctacaacgtccatcgcggtataatacccagaaagctccgaccaaccttctaccgctccgtcgcaaagtgccatgttcattccccccgcgctatcaagcctatataggctcacctcgatagtcagctgcttacctcatcctataggtccagttgacttcgttacgactcccaaaaattgggacgattgtccgaaaccgcgacggtaggtacgagtgcggtcccttaccgggaatcggcggtccattcgatacagcaaccgaattcttcgaggcgtgggccgacagcgtcgagtttaagtgggataaagagacaatcataagtatgatgcagagaagtccgaaccctgcagaacggatgatcgcgattatcgagaatttcccgttacaaatcaaagctatggctagccggctatcctcgtgtaacgaagggccattccctctagaccatgatgacttttttcatagtaacatcatggtggatgagagcttcgatgtgacgggaatcatcgactgggaaggcgcatgtacggttccctatgagcttattgcgttccccgacttccttacagccatgcctgtctccttcgacctgccccagaaatacgatgaagatgggcagccgttcgatgaggaaattcgagaaatgtggcgcgagcgagaagggtatatcgaaatggtcagattagccgagcttgacgacagtgtgctttcggattgcctcagcagcaagaggagccaggctatagcttatttgtatggggcgtatactagtgttggaaagctgggcttttatgatcaagctgtgaaagagatagagaggggagaataaaactcagcagttcccctatcctggaatgataaaacgaagctcttcgtagagttattgggcggtggaacagcatcaaagaagcaatttcctgactcgaccgtactttcgggtgggatactccttggacgagccacattgagagatcctctgcttggtaaaagactctgggcctggaatagaaggtgaatgttaggcgcgaccatgcagtgtccgatcaagtatccaagtccggcggagtctaaaccctttgtggaatagccatgttttgtaaaccgccaagacccttctcttcttgaccttccactcatcactttctaggatatgctggacaatgccggaactggcgcgggcaatccctcgctcatggacctcgacgttgaaactgcctaaatcctcattccctccacgcgtatcgcctatcgatcggacgaaatacctaaaacgatgcaccgatgatctctacgcctggcaacgccgcgaaaggcccgccgaccaaccattcgtcttgcatgatggcccaccatatgcgaatggcgatctccatgttggacatgcgctcaacaagattttgaaggatattatctgtcgcgtacaattaggtcgcgggaagagggtgcggtacgtgccgggctgggactgccatggactgccgatcgagctcaaagcgctccaaggcctgcaccctgaggacattgcaagcggatcagtcagcgcagcggatattcgcacgtccgcgcgtaaattggcaagacaagccgtgaaagaacaaatgaaagggttccgtggcttcgcggtcatggccgactgggagaaccactggaagaccatggacaaacaattcgagatgcggcaactgggtatcttccgggaaatggtggaccgtggcctcatctaccgaaagttcaagccagtttactggtcgccttcaacgggtaccgctcttgcggaagcagaactggaatacaaggaggatcacatctcgaccgccgccttagtcaaattccctcttatcgatatccctacttgtctctctgagaatcctcttcttcgtggaaagaatttgaatgctgtgatttggaccactaccccttggacgctgcctgccaatgctgccattacaatcagcgagtctttggaatacgctattgtcttatcggaaaaacatggtcatcttctgatcgctcaatcacggttagagtacatccagaatatgctgaaagaagaactctctgtcattgtaccgtctatcatggggtccgagctggcagagcgaactacctatcgacctctattcaaaggacccgaagctcagccgcagcccatcttcgccgcggactttgttactgctgattctggctctggcctggttcatagcgcgcctggtcacggaatggaagactacgaagcatgtcttgcgcgtggcattcctgtgttcgctcccgtcaacgatgagggcaaatacacagataaagctatgcccctcgatcctacacgtttaactggaaaatctgtcttgggagaaggtaacaccgctgttttggaatgggtcgaatcgtgtggtcagttgcttgcccaacataagtacgagcacaagtatccttacgactggcgttcaaaacttccggtcattattcgggccactgagcagtggtttgccgatgtggccgatatccgtggcgatgctcttcgcgccttggaagatgtccgcttcgttcccgagactggaaagcaacggctcgaagcctttgtgaaaaaccggagtgaatggtgtatctcgcgacagcgtgcgtggggtgttccgattcctgcaatctatcaccgaaccactggagaggccgtcttgactaaagatagtatttcacatatcatgaccacaattgaagagcgcggaatcgatgcttggtggaccgatgctgcggatgaggctgcatggattcctccgtccttgcgggacgaggctggagcggggtatcgacgtggaatggacaccatggacgtttggtttgacagtggtaccagctgggcagagatcgatgttcctatcgaaggacggagtcatccagccgacgtgtatcttgaaggtaccgatcagcaccgtggttggttccagtcctctcttctcacatatatctcgcaccagctcggctcgggtcaattcacgacgcctcgtgcgccatacaagaacctcatcacgcacggtttcaccctggatgaacatgggcggaagatgagcaagtctattggcaacgtaatccacccgcagaccatcatggatggaactttgctgcctcccctcaaaccccgcaaaggcaaaggaaagaagcaacccgagaaccaagaaccgatgtacgacgctcttggccccgatgcgcttcgcatgtgggcagcgagcagcgactacacgcgcgacgtggtaattggaaaacgagtactccagaccgtcaataccagtctccacaagttccgtgtcactttcaaactgctgctgggtgcccttgccgatttcagtccagcgaacgttgtcccatatgaacagctgcagctggtcgatcgaattgcactcaagcacctctcggatatggtactcacgtcacagaagacaagtgataacttcgagttctacaagggcgtgagtacgatgaaccggtgggccaacctcgagttttctgctttctacatggaggcgatcaaggatcgcctctacacccttggtgaggacagcacgagtcgccgggctgcgcaaacgaccttattctacatctacaattatcttcaagaggccctggctcccatcacaccagtgcttgtggaagaaacatgggaacatactcccgagtctatccgcaccgagtctgagcacccactgcagcgtatcgtctccgcccccgctccggagtggcaggatttgaccctggacaccagctaccaagagctgacggtggttcactctgccattaagaatttgcaggagcaggcccgtagtaaaaagcagcttggctcctccctgcaatcctttgttcacattgtgctccccagcagctctggattattccagcagtatctgtcggagctccctgatctctttgtcgtgtcttccatcaccctgtcatcccacgatgaagctattccgaccgacattaaggacgccgaatggcaatatgaggagacatttgagctaggtgaccagccaggcaaagtgtatgtgtacgcgccacaggcctccaagtgcccacggtgttggcggtacgccattccggacccggtggcgatcgaagatgcgatttgcaaccggtgtgagacagtgatacatgaggcaaacgcctagagaactgtacaaaatatgtatacttatttctatgtattatagctagctgtaggtgattggacagagcagccaatttaccaactgcagtgcaaccagtaatccaaaacatccgacattcacattgaaaactagactgaaagaaagagtccatgtaattaatgtattcaatctatttgtccatccagtgaatgttctaaatggctatgacgacagtatccagtcaatgacggtcgccccaatcatccccaaatcctgctttgatgcaacatcatgtcatctatatagtcttgctcttctcgtttcttcttcttcctctactcaacttcctaaattcatcatgattcaacctccatttgatcagtttgctactctaacggcgcccgccaccacgtcctcggtggcgcctattcccactatcattccggggtatgaggtctaccaggaacttcatgatacaggcaagcgaactctttggtatgtatatattatactatgtattcaaatgtttaattatcctaacatttatagggttgtcactgtgttgatgggcgtttcctcgctggtgttctatactttggccgctcgtgctcctctagtgagttcatctcttctatatcatatatgctctcttctattattcatacctatctaacatatgtccagtctaaacgaatctttcatatcctcacctccctgataaccacaatctccttcgtgatctacctagctctttcaacaggccagggcataataaccaaacacgacagagtccacgaatcccacaaacatgtcccggacacccacacagactacgctcgccagatcctatggctgcgctttgttaactgggccatcacaacacccctgctcttcatcaacctcgcccttctatccggcttaccaggcgcaaacctactcatcgccattgtcgcccacctgatcatgcttacaacagctgtattcggcatattttcaggacacggccgcgagcgctgggtctggctgaccctcacatgtatttcttacctggtcgtgatccaccacattggcttccacgcacagcgagcggcgaagagcaaggatatccagacaagacggttctttgggtctgtttctgggtctgcaattgccatgttggcacttttcccaatgtgagtgatatatccaaaagagcactcttgagttcaaaccgatgctaatgttgggtagttccctcgcggctggtgctctcgcgctcagactgagtgttgacacggagactatccttttcgctatccaggatgtcttcacgcaaggtatccttggatactggcttctgttcactcatgagagttcgcctggaatgtaagtctcaagctgaatctcggtatgacgacatgctaattactgcagtgcactctacatggaaggattctggtcgcatggtgtcggcaatgagggagctattcgtatctccgatgaagagggtgcgtaaggaaataactccacacattcagactaggattctggtgataggatatttgttctctcttttttttttttttttcagttgacatttctctcacttacgagtcaatttggtttaaggcgttaggattgaaaatgagtatcaggatgtttactttgacttgaccctactatttcatatgtctgttctacttattgcgtactcttttaaataagaagcagaataacttaaaaatatttgctttttttggggggttttctaaattgtctttcttgcgtagttgaatgatatttccctggcggcacactcactagagccccctagggaaggctctagcgagcgtgccgccgcccatgaacacggaccccgtccgtttagaacacccccaggcctcgcaccgcggaagagagctcggcaagctcctcgtcactgagctcctcgacggagttctccccggagggcccgtcttcgccccgggccactccaaactcgcccgcctgacgaactcggacgtttcgctggaagcgagggagccagaaaccgcagtcgatgcagtccttcttgaagtgaacctccttgaggttccggaaccacatgccaaaggggtccccgtccaccgcgaagccgctcaaggtgagatgctcgacgggcaggtaggtggggacggggaacccagtggcaagggcaaggacctttgccttctcgatgcagtacttgtcgaggtactcgccgtacccgaccttggggctgacctccccgtcgccttggccactaaagtcaatcaggttagcatatgtcacgtctcttggtatcacattactctcagttgggcacaacttactagtatacgggtgaggcatgcgacttcacattcatcacccagcccttcttgatgggctcccagccacttggtcccaccggctctacaatctccaagccaacagccatgtgcagctcgagagtggtgagatgagggttcaaccaaaccgtcttccagatggcaggctggtaggacttcatcataccaaacagcttcagcacacgcaagttgcggaactcagtcaagggccagacctggtccatggtgagaacactgactttgatcttgtcctttaggttctcgaagaagcggtcgtcgtcgatggtattgtccttcaaggcctcgttgatgatactgctaattgtttcatcctccttgggagcagcgacttcaatgacttcttggtcggggtaacgaggcgcgtcacagatgggaagatcttgcatcccgaactcattggcattgtacaggtcccaatcgtggacagcggccttgcctttcgcgttcttgttgttggtcgggctttcggcctcagagctctcgaaatcgaacattgtcatcgaggagtcaattgccaagttgccatcggtggtctgattttcgatagcacaatcagtgttgaccccagcctgctcagtggtgactggcctggcagcagacttcaaggtgggagcattgtccccagcggtagcaacacccgtcagaatatcatcagactgggtggccttgtcagcaggcaggctgtcgatggcagaacccttgatgtcgggctcagtcatggtggcattgtcgatcatggtggtggttttgacaggacattcgacgtcgaagtcggtcatggtgcccttgtcgaccatggtgacctcatcagtcatagcaccttcatcaagaatttggtcatcgtcgagatcaacaatgctctcaggggagaccttgcgaacatcgaaaagcatgttcagttctaggaccaacttggtgcgagggatatcatcccaagtgccaccatcattgaggtgagccatcaagtggacgaaagaactggtatctgggtgaggaggagccatagtctcaggttgaggatcactctgttgctcaagccagtcttgaaagctgagaatgctgagatggttgggggccactgggtcgcaaggataagagtcttcagaggcggtgggaggtgcaatgtcgatgttggtagcagagggtcctctgtagagagaacggaaaatgggacgtggagcaggagggagtgggggaagagaatattcaggagggaagaaagttgtaggggacaagatggaaggacgtgtcggtgtgggcttctggagttcaacaaaaccctcagtggacgcgacgatgggacctcggtgtctgagactcagactcttaaaggaaggaaggcgccaactaccctttttggaactcttcagactctttgtgggactcttctcaggtgagttggtggtatcagttcctgcagaggagtgaaggaatcgaaggttattgaaagaagcaagtcgagagagtgggaaaagactcttcctcttcgttgggctctttccagaagcgcttgtgactgtcgtctgaacagggtccttagcaggcgactgagcaggtgactgaacagggcttagatggggcggtagggctaaatggtgacgggagcattagcacgaactatagcaacgtatagcaaccagcatgcttgcatgtaaggcattcaatgtagcaatgctacgatgatgcagcacatgtaagaacgtgtaagaacataccttttctttcacctgcagtaagctgctcaacatgttttgttgcatcttcccagaaacggacacctagcaggctgttctcccattgatcacgcatatcacgatcatacatgctatccatgatgaattctggattaacaacaatgaaatttggatgaaagcaagtatctgaaggataggaaggatgggagaaggatgagaggaaggggaaaaggatggggaaaaggtacttcgcatgggtgctcttcaagcgtgcgctccccgcgttaacaatcactgggcttaggtaccatttgcgcgagtaaagccttcgctgagatcgaggtcgagggctccggatcaactctacacgttcagttaaaacagtcctcattatcacactacacgtcttcttcataggatgtggttcaacaattcctgacttatcctctataaaggctaaaaatatagcacagcttcactggttctgtcttctgtcttctaaagtacgttcaaggaagacaaggatatcctcaatggctcattcgagttggagaatacccaggcgtctctgtagttgccagttagagtataaaagcttcgttcgtctctaatagtctggatgcaatttactatcctggtagcaattgtagctatacaagaagttgcttctttgtgttcatttaccttaagatgttcgacactaacaatctagttatggcgtgatatttattgtaaataacaggtaaacattctcctgttgatatcactggcaataaaactatccggggcgatacctgtttttaaaaggtgcaatgcttcaatgcgtcaatagtacatactcgccgatcttggtcttttaggtttaggctagtgacggcccgcgacggacacccgccggtccactacctgaggacctaaggctccgatgtcctagtaacatcctatatggccttctagattcattggaactagtctagtcccgatggtcttctggtcaattaatccggtgcgttaagaaatgttgccgaggtccattctgcaattatcagcggaagggcgaggtccactcagacagacaacgctggcagagaagagaagggtggtgttgagaaatggtccgatactaagaaatcattggctttgtaactgatggtgtataggattcttctatttgatgaaccctttcttggccttctccagacgaccgagacatgcgagcatccgtcacacgtcgctgatattcttgagactgttggaagacagcatgatggtttttttactgtcaattacattcgccttcgctttgttgttcaaaagacagagcggcaccactattgcttcaggaaattccaatttttagatatgatttatgatatttcttgcttcaatcgacttgtgaagccccgaggagaatgtatgaggataaaaggaatatactgcgtattccgataaacgaacagctgcctcttccaaggagcagctggcgacgttcacggtggcaaggccacgacgtggctgcttttaccgcgcaacctacccctgtccggtaaaaggtatagtagtagctaatggcgccgagcgagcgatcgaagtacaaacacacgacttatttacattacaggctactgaaggtgcgggagcatactcgctccattctattctctatctcaagtgataaaggtggcattgctcgggtccaccgggtctatgtcggaaagcccttacaatccagaaggattgggaaacaaggtcaagagacatgatgtaactcctgagatgaaacaaaaccagaggaagatgaaggaatcgcgtaagaagctaaacctatttggcttacagcctaatttggtgacccaccagtatatgcctccagggatgtgagaaacatatacatgtaccggataatgcctggcactcgagaccttcccctttccgttttagtgttcactgggtgagcggcctgagtaagctacatcaataaaatgcgacatgcttgccccgtcacgtgcaactcttcccatttagaagtaggttgtcgatctgccagcctgagcctaataaaataaactactaggtggatatctgtgaaaaagcaagctttgattccaactttctaacaatacatgtagcgataatgctcaggcccccagaaagacatggcggcagcacgcagcaagatcctcggccgtgaatgtgatatttccttcccccgtgttaggggtcggcaggcggcgcataacggattcgaaatccaagtgtagaggggcattctggacattgtttgaggcaataacgacctcattgaccgctgaatgacgtagcaccattggggagtctgtttgagatagcagagtgcgctgggcctccgcctgtagtccacgggtgaatctgggagtggttggtatcagactgtattgttttatggtgagtctgcgctcgggcgatctttggatgtggaagagaataaccatgttgactttgtagtcggaatttgagaaccaccaatatgcgtcggctcgtagttgggcttctgattcagaaagaccagtttcaataacgagcgaaggccagttattattgtcaaaaggatttcctgacggagtaagacactcgtcggcttctttatcgcatgttcttccgtgatatcgggtagccgagttcatagtgtaatcatccgaatcaattcccatttcgattaattttaggacgagtttgtttgaaaatgaccgcgtcactcgctcatgagctcctgatggtatgattcgaatgaccccttgctggtgctgtgtgtcgagtgtcaatctgtagggaacctcaagagggtttcgatctccagctattagctcctgcacttgctgggatatgtttgacacgatgataaactggttcgagtaagacgtgttggtgttgatttgatgatagacatcgtccgcagtttctcgaagggtagaaatggaaggagcagacaacaccacagcacccgggatttcgaatggcaggtgcgaataacagacacctgcttcctcgaccttgacctgcgaggttcgaggcgcaacatctgactcggtcctatcgagggacttcgagtcgacgtcctttgcagctaaggaggaggaaactgtggataatagcggagacagcatattggcgaaataggggtgtatagcgaaaggaagatgaggcagaagaagagaagtgagaaggctattaacaaagggggactggtagtgtcatcgttacattgaataccggtctttttaccggacacttatgtgacctaaaagtatgcattttgcttatcaatctgcgtacaaattgtgtaaattttgcttagagaatttactgctattgatttttacccgtacgctcgtcatacctggatttctgtcaagtagtacctatatatatcttagatgtactatcatgtggagacctttacttcaatctaaagatacaacatactccaatactacataacttaataccgatagtatcccttagccagtgtcagatagacagcctggaccccagagtagtgtttgtttgcacataaaagctgcctgggcgacctctctgtacgtctcatagcgacattgttaggctgcatgtcgaaaatttagacttgaactagaagttagttcacccaaaatcaatgtctgtcaggtaaaaacaactactgccctactacaaaattactgctcaaagatcaatctggctggcaaatggcccgtggacttcgctattttgtgtccctccccaagataaatacatccagagcggtgcggagatgtctctcgcacacacgaaccatcttttaatcaccaagcagagggggaagttttaaaagaaacccattgaaattgtcgaacaaaaatcatgcatcatccataacctagtacttcttgccctggcggaggacatcaccgaactcctccagagggctgcggatgagcttattctcggcccacaggttgggggtaaggaaaccgtaggtgttgacgacagcgacgaaggtggccttgagggtgttctcgagggtcttggtggagccggaagaggaggtgtaagcgtcctgaacaccggcgagctggagcaaacgcttgacagcaggggaagcgacaaggccggtaccgcggggggcgggaatgagctgcagtcaattagaaaccatctcttcagatgtccggccccaaaaaggactagatcagatataaaccaccgtaggaaacttacacggacggagacggaaccacactttccactctgcttgacgggcagagagtggggctcaccaaggttggtaccccagtaaccgcgacggacggggaggacagcgagcttggcgatggtgatagcagcacggatggcggtagcgacttccttggaggtcttgattccgagaccgatgtggccctcggagtcaccgatgaggacaatggccttgaaacgggtacgctgaccggcacgggtctgcttctggacgggcttgatctgtaggttgaaattcacgttagtttctggactgatttcgatgtattcgttttccgtttgagctttcattgcgcaattgcgggcaattgtcgcattccagtcgagtcccgctcaatcctccaatttcaaaaagggtgtgtcgatccgtaccttcataacctcatccttgagcttgggcaggaagaagtcgacaatctggtactccttgacgggcagagagtggaggtagatctgctccatggaggtgatcttgccggccttgacgagacggccgagcttggtgacgggctgccactccttctcctcctgcttggggccacgacggccgcgacggccaccacggccacgtccacgctcaccaccacggtcgccgcgcgaaccgaaaccaccacgtccacggggagcagcgtcagccatattgatgttgttatgggaagcgacggggagggttgtcgggattgagttggtcgtcgagtttcacggcgctgagcactgtttgcccgaaatttgcgcgggtgggctaagcgagcgggcagccctagtggggaccctatgccctaaactcccgatcgggaatgtggcacgtgcacttaaggtttccagggcggtgtcacctgatggggcccagaagtaaatggattgatcgccgttgttgtagagaggcattgatcatgtagaatgagggatagatttgcttatggtgatgttgaggtcattagctatagaaatatttacaaatatatcgtgtttttcataccaatcgagtcccgcaatgttgttattctcactgctacgtcacaaaatttggtgcaggcggatgcatttcctatttgggcaatgcgacagggactccgcaatttcaagattgttcccccagttgcccccagttcaatagtatttcagcgtctttcgtctgctttttgttctttctttgcatccttctctgcttgttttgtcccttatagccatccaatcgcagttatgctacgctggtaagtctctcttactcatctccttcaatcgcagctcataacattcaaccaggtaccagtctaagttggcaaagcggcctatcctcaccgcaagcatcaccagtgctgtatgattctctcctttctcctttctctggaccagttcctgactcttgttacaacagttcctattcggtagcggggatgttctagcccagcaagctgttgaccgaaaaggtctccaagagcacgacttcgctcgtactgggcgaatggctctatacggtggaggtatgtctatatgtctcaagtgccttgtacattgctgatccgtgtcttttcagctgtcttcggtccggttgccactacctggtttggcatcctccagcgtcatgtcgttctcaaaggcactgcgtccaccaccgccgctcgtgttgccgccgaccaagtcttctttgcccccacccagctcacatgtttcctatcctcgatggctatcatggaaggcgctgatcctgtggaaaggttgaagactgcctttgttcccgcctacaaggccaacctgatggtctggccatttgtacagggcgtcaacttcacatttattccgctagagctgcgcttgctctttgtcaacgttgtcagtttgggtgagtaatttgcttcgaggtgttgctgattatgctcctggctgcagtcactaacaactaaacagggtggaactgcttccttagcttgatgaacagcggggaggaattataattccgaggcataatttgagatacccttgatgtttttattgtcggctttctgcttttcacgtcggcgctccaatacgaaggatttttggttgggttattcggtctttgggcatcgtgttccggaattttattcttcaattttcggccatgtagaatcctggacagtataaatgagaataaaaatattcaaatgaataagaaatgaatcaaaatgatttgaagacaaaataagagcaaagtgaagatcggataactagttgggtgtgatagtgattatgttacggaagaacccaaagaggcaaggcaagtttttgtggctcgaacttcaaaacttccactctttgcagtcaattgtcgcccacctccactctcatctcacactgcctggagcagactattactgctaaatagatctaggcttggattcctgttaccttctttgtgtgaaaagctctgatttgcgctttccttaaaattctcgcccctccgactttccgaactcgatcgtcttcccctccacatccattcaccatggctgccgtcgcagaaaacggtactcccgctgtggccgatgagaactccgcccctgtcaccgagactcagactggtgatgccgttaccgtcttccacaaccccgatgacttcaacgtgaagcaccctcttatgcacgaatggactctgtggttcaccaagccccccagtggcaaagtaggagacaccagtgggatagatcgacgtcagcatgcttaccaatggaacctagggcgacaactggaacgacctgctcaaggaggtggtcactttcagctccgttgaagaattctggggcatctatgtatgtccaaccggacgtctccctcgatcgacaataacactaacctcgagcgctattagaacaacatcacgccgacctccgaactcggcctcaaggccgattaccacctcttcaagaagggcgtacggcccgagtgggaggacccccaaaacaagcacggtggaaagtggtcataccagttcaaggacaagcgctccgttcctattgacgaactctggctgcacgcgcagctggccgcgatcggcgagaccctcgagaatgacgatgacaacgaagtgatgggagtagttgtgaatgtgcgcaagggcttctaccgtgtcggtctatggacacgcacagtcggcaagagtatccagggagacaagcacacccgcacacaggcgcagggcaaggagattctcgaagcaattggccagcggttcaaggacgtgctgcggctcaacttggcggatgtggtggagttctccggccacactgacagtgcacacagcggcagcacgcgcgcgaaggccaagtacaccgtttaagagggctggctgagacggtgttgtgcagacgaggatgaaaaacgaaaaacaggggacggatggcgatgcgcagatttcacgattacggacgacacgaatcgaggggaattgactcgactcgatgtgcggtgccggaaactggggatgattcacatagggaccgaggtaccccccctttatgccggccccgctgcatagttctgcagggacgaactgattgcttgcgacttgtatcttactctaccaaacacattttacgaggcttatgccatgattaaggtcgaggtcgtgccagtatgatggtattttccctacattattctatacaaatatgacctgttcatggatgcattcaacttttggtgttgcgtgctaggtcgggtttcgcgagatcaagcccttgagtagagctgctgcttttggatggcacatgctgagaggtctatatcagtagatgtagctagaggtgtttgaccctcgtcgcatacgtctgtttcttgtctcttctgaccagtgtcgcgagtagaaggtcttttagggcttctaatggaacttcttggaatgcatggccaaagacactttagtactatgttgtatgctgcaggggtgctcaggggtgcagggcttcgaccatgttctgcggatttacaccgcatttacacgatcctctcgcaggacactgttgaaggactcatacactagcacacgaatattttctcattaatatcctcatcatgattagaccagaagacaggttttactcagggggagttatttggcagacgggtgggcgtttgagacaggttgcactggaaaagggacaatattgttttcaatggcaaaggccaccccaaagtaggctgttgaagaaggccaaagattgcgtgcagtgaaagattgctcgggcagcttgaactaaaaccaaccatttgtcagatagcagaacatagtcacaaagcagaacacaaggcagaacacattatatctttgtgtaaatctcatacttatctaaaaatttgtcacccaacatccaagtcttttttgagtgacgaggctgtatacttgtgacattcaagacaggcaattggctctctatagggattataggtatatctcgctataggttgttaccctctcaagaggttatctaccaaacgctgggaggtattataggcaatgaataacaatggtagcaaagagaaggaggggagatggacgattggtctttgagagtgtggagtagataaatcatcagactaatatactggacgagcttgatatctactttccgaaccatctgggataacaagaccctcctgcgaaagaaaggtgaactgtcatgggatcgcatctccgggatcgaaaagtgtctcgacccctggctgataaaccatgaaggtttactggctaagacaactaacctcgtagactgttactacttcgacaacctatatggctagttggagagggctgaagctctctaaacaactggacagaagtcgtcatcgtcttatgcgaccgagacgttgccagcgcaactagctaactagctagacctcgatcattgtagagaatctatccttcttcatctctctcacttgttccaagaagattcaacaacccatgaatgcgcaaaattgatgaatctaccagaatcgcattacccactccttatgggagcggaaggacctgcctagaagggacagaacatcatacaacaaacgagaagggcaatcggcccatgcagaaaaccagaaaggtcccgcacccatcagaccagggtgttcaggaaatccacggaatcagcatcctcatcatcactgctttcggcgtcggtgtcgttagacggagcccaccagccgagagcgatcatcccggcacgcatacaccaatagtcgtcatccacacgacgacgcacagaccgaagccgctcgaagatatctagtacacactcctcatcgttcagtttgtacaccatgggccagtcgagaggagtctggtatattgaagcgtcatactctggtccagaaagaggctttgcccactctgcagaaggaggaatcggaacctcttctccactcgccgacttcttcggccttttcgacggcttgcctgccgccacgggagtcgcaggagccgcacgtttcttcacggattcccgaggcgtctcgggaaggtgctcttcgccgtcgtcaggatgagcatcgctattatcgctatcgccagaaggagcaacagctcgctccttgcccttgcgacaaatctggtcttcggcaccaccctcttgtatctggacgcttaatagctctgctggatctggcgtagcctctgctggatctgacgtagcctctgctggatctggcgtagcctctgctggatctagcgtaacgataaagctgaggttcccacttgtcgttaattgctggcagtacacaggttgaccgttcgggtttattgatgagtcttcttcccgcttgattcttggccttccgctggcagcggcagcgatagagacgtgataaacctgcctgcgatgtttttgcatcgtttttacgctgcgacacgtaaattgacagttttcgacttgacagcagttaccacggtagaccggtaatccggggatcggccgggagtcaggggatggcgggacaaaaggattggtattgaagttccttccaaccttgactgcttcagcacaaattgccgtccgctgtgccaatgtacgggcagaagggtgttgtcggtgcttattggctagatggccgacaatggttttagcatccacggcagattcacaggtcttgcagattcagaactgataagtggggttataggtaaagaattccccaattaagttcatggtgatagtgcgactgtacgagtgaagaaaggagtaatattagactgaagaatagtaagatgcggttatctcgcgacacaacgcgacgcggataggtgaatacagaatatctatagactatagtagtaggtgaatactatctttattagctagtaaggcttagaagttagctctggtattattagccaagaaacgtacagaatacctgttgaaatgaccgaaccgtttgttacgagccaattcgattcagaagaaaagaaggtacaaggacatagtcgttccttcctcgtttggcaagtacaaagacgtgaccgttcctgcctcgtttggtaagtacgatccttcccagatcgtcacaccgttaacgactgagtgaactgggcatcgggccgaggatctacatgcgggattagggtgcatttgcaaaaggaatccatagtagtagggggaattgtaactagaatggcctcacgattgagagtctggagtatgggatatgtcctggctcagtatccggggccgaagaagagacaaaaagtgccttcaaagttatgttggggaaaataactgactattcagattgtggtgtatcccgtatcttagaatctaatatatggctgtggatccagactagggattgacctcatgtcatggagatggatgttctatccattaacactataaatccctgttactatcagccagttaaggacagtgaaatggtaaacatgctagtaagttgcctgttttgtttccttccttatccgaacttacagtagagtcgaacaccagggcagagaacgcgtctcattgctagcagaatatcacctcgtataggctagccaataggaaaaagttatttatagaggtaagcaagctgcttccgaaaaatccatgatcagcacaatgttctttattgatacatttccttgcaagttcctgctgggaatagtagaatcccctagcaggaatacccagaaacagtactccgtacctcaagatacaaccttcatatttcttcgattcatggatattctcaacacaaatatagttcgcctgaggtcagcactatatggatacaatccagcaagtcatggagatccactgagatgctctgagtggctggtggtgtcgcaatatcaaagttcccggagtaggtcctccgtactccgtagagccctggtcttggtcgagggccgacatcgcaagttgtcgggttgttctcatattggctcaacggcatagagtagtggtctaagatagttcgattggaaggtcgcaacggtatcagatagggcgtggaggattgcgataaagcgctttggcgacttgggcttggcaagtaagcgtgcgccactgggagagcacgcaactcaaccctgtcgagtggccatccagacgatataaatgtctagacgatcaactcgagcaaccgcataggatctttcgagactgagtttaacagaatttataaagtcattcgggacgccggcgattttgacgtgatataatcctgtgccggtgtcgggattgccaataggttgggtcttagtggaactctctcttaaggcgttggtcgcttggcgaacggctagaatcccccagggattgggaaataatgccgaatggtcgtgataagccctcctgttggtggatatgaagctcatctttgtccgcaagcgaagtcggagcccaaagagcatgtgctataactcttggtgttttcttggtgttatattatgagcgatgtcccagttgtggtctttgactctctctctctctcttttctcttttccttcctttccctccaaaaaaatgtccatatgatgagatgacctctattcctccaaggaagaccacacatgcgaatgaccaacactaactgaaatcttcccccttatctgctgaggtcttggcaagtcaccgggcacaaaccacagatccaccatcgttcaatgtttctacgcaactcttacgagagaataattaccccggaaaacagagaccagaccagaccagaccgaatgataggaacggcgggttctggtttctctcatcgcttggaatgtattcaacggcattggctattgctgtcttgacggggaaacgcatgccggggtaagcgggtatgaagctttgagacatacgaaactccacgggaagggggaaaagggccccaacgttacattggcaatcatctggtgattgtgattaatgcgatttattgatctcgcaatcaggaaatccgcgctcgacatcgcatatcccgaaagcggatgtgttttccggtcctgagtcgaaggcgctcaagccttgccaatatgcagcccatgcagcccatgcagttcaatattagcagtcgccatcggatttccaaatatatccttactgatttgtcgatttgatggcattgggaaggcgaaaacaaatcccagaatttgccctcgtggcaaatcccggaaccgtcctcaactgggaaattttcaacctcatcggcaatctccgactgcacatctcaacgtgattcgatgaaaaaaatacacaaagtggactcggcctcaccccttctagaaatccccaggatgccaaatgcaagaccagaccattcgctgctctgattgatccggacctgtatcaagagtccaccctatgctcggcctttaattgcttgactcgttcgtttccgtgtgcactgtctctgccgtgtggttacattcgcatgctcgtgggtcgacttgctcgagttcagccattcgccgtgggacgataaacatgccgatcgcatccacggtcgaactgcgaacaatggcccgtatgcgaccttctcggatgagccttagtggcatgggggcatgggggatggcgtgcaatttgctttttttcttctttttcctgcttttctcaagataagactctcctccggtcccacttggcctcatttgtcgagtgcacgaaaatttgcatatatagtattaatcacgccctttttttgtgcctctttctctactcccgattgtgattttttttctaggccctcttgaaagagaaggcatcatctggtctcgtagccatgtcgtccacagaccgtgagatggagacttctgcgtatgtatctgtgtggctggcaatttcatgaagggcaactaaccctctcttcagagctccaccctatgacaccgaagaggtcactcaccatgtcgtcctgaatgaaaaggctatggatgccgagttcgacaaggagaaccagactaccccggatggcggcgaacccacactctcggagaagatttccttgcgtcatgtcgcagagaacctgcctctctccgcctggttggtggccgtcgtcgagctgtgcgagcgtttcacctactacggcatgtctggtctgttccagaactacgttcagcggcctcgggatggtagcgagggacgtggtgcgctcggtatggctcaccagggtgcaaccggtctcactaccttcttccagttctggtgttatgttaccccgatcgtcggtgccatcattgccgatcagtatcttggcaagtacaagaccattgtgctgttctgttttgtctacatgattggcctgctcatcctggtctgcacctccattcccactgccctggaccacggctcaggcatcggcggtttcattgtcgccatcttgatcattggtctgggtaccggtggcatcaagagtaatgtggctcctttgattgcggatcagtacaagcgcaagaagatggccatcaccaccaccaagaagggcgagcgcgtcgtcattgaccccgccctgacaattcagcgtatctacatgatcttctacggatgcatcaacctcggttcgctgtccctgctcgctactccctacatggagttgtacatcgacttctggccagcctatcttctctgtctctgtatgttcatggtcggtaccctggtgatcattctcggccgcaagttctacgtcgttcgcccaccccagggctccatcatcacggatgctttccgtgccgtctggatgatgatgaagaaccgcaacatggatgcccccaagccctcctggcagaccgaacacaatggtgcgtcctctgtccactgggacgaccacttcatcgacgagctgaagcgcgccttggtcgcctgccgcgtgttcgccttctacccgatctactgggtcgtctacggacaattctccggcaacttcgtcacccaagccggtcaaatggatggccacggcattcccaacgatctgatgcagaacttcgaccccatctccatcatcgttttcattcccattctcgaaacctgcgtctaccccctgatgcgccgtttgaagatccccttccgcccgatcacccgtatcgcccttggcttcgtcgtcgcctcgcttgctatgatgtacgccgctatcgtgcagcacctgatctacgacgccggtccatgctacggcaaacctttgtgcgcggcctccgaggtcaacggagaagcccaaggcaaccgagttcacatcgccatccaaaccccggcctacgtcttcatcggtctgtctgagattttcgcctctgtctccggtctcgagtacgcatacaccaaagcaccgcccagcatgaagtccttcgtgcagtccatgtacctcctcacgaacgcgttcggctccgctctcgccgaagcactcactcccgccgcctacgatcccgccgtcatgtggatgttcaccggtcttgcctgtgcatcctgcatatgcggtatcatcttcttcgccgtgttccaccacctgaatgcgcaggaagacgacatgaacgccctcgatgctgaagaagagatgcccgaggctccggttgaggcggcacggggccagtccaaggccgagtaggcattggcagtgtattttttgtgatatatttgtatttttcttgtttctttggcattggcattggcagcattgcaagtgtctcttatctcttacgctgggatcgtactttttttttcattgcttgcatcatcggagcgggaccctctgtgtgttctaaaactgctgtgcagattgtgagacgtggtatgatatgatgcattaatttagtatatacttattaagaatgaaaataatcagtatacttatcaattcactccatcttcaccgtacttccaaactccatgttcgtgggacagacctccacaatgacgaatatgacagacacactacggagtacagactactccgtatagaagtggattcgactccatctctgtgatgatcttctccgctcctttctgcgacacgccgtttcaattatctttcaagggtctgctcgcactgttaaagtgatttgggtaagagcttatccaaaccacccaaatcggaagtcaaagctcatgccagagcggtttctctttagtttggatatgtgatgtttctcagtcaaaacaagacatcagatttgcaaggctggagtgaccctcgactttcattgctctcaaatcttgagcatttggacatactcacttttcggaacgtcttttttgaagttgatctaagcctcatatgcccacctttgcacaacgccagatgacaatggcctcgcattcctatcccttggccattggccgaattccgtggcttctcctaaaatgcaaagcattctagagcattcaagctcttccatatcgacggcagagatggttcagctttgaaacgaaggactaaagctgttagtaccaagctatatgacagaacattgagcctctttttcatgcttctcttagcctcccaacgtctggcctccagttcagattccaggaattattgtggtgtccccatcctgtatgtgtatcgaatccaccagatcgagacaatatgctagtttgtggcattgaagggattttaaacatccacaaggtaaccttggaatggaatggcttagacagatgtctaccgaggtagatccacatatgagacccacactccctgacttcagaggctcaactgcctcgggagcacagccctggcggtcaactgcctgaatacaacaaccattaggtgaactctgtggctaagaatacccgaggcttacatgccgcagatgcatgaggggcgagacctgggaatcgttcgattatcatggcagatatgtcgggtgacacctaagaaggatgatacggttattgtttgagtatagacaagattcaaaacactaacggttagtccggggtgaagaaagtgagtgttggggatgaaaaggggacggagagttcttaggccgaaagaagaatagaccgggttaccgcattgggcaacctcatagccactcctccgtacgatagcccttatacggagtaaccatatgctgtatagatcaggcagctatactttgactttgctaaatgagatttagttgatgcctgacatgaggctgatcgaaccttctaaatgccctgattggccaagtttcacatcgatttttcagttcgtcttgtccctacgcatgctatttccgacttgtcgcccagactggattgttttcctattggaatagtccgcgttgcatacatatgtctttcatcaaggcggtacatcataatcatgacgtgcagactcccttgccacagaccgtcggacatgtaccaggtacatcatccagggtggatattacaaccaacgccaagtatccagtacttgatgaaaaaatatgccgctctcccccttcatcgaatcacacggatctgccatgtcttaaatagaacaggctcagccacacaggatgaaaggccaatctcggggactccaccgccaaattgcaaggaggctgtatccgtactaacgtaggaacggtgcactgtccactctgtagcagacggttaaaaatagggggaccccaaagaaaccactgtaaatgcgaagacctatgaaacccttgaaaccgtcgaaccccgttaaacccattgatcccttttaattcaccccaaattaatgcttaattctgctattcagcgcgactaacccccggatcttattggctttgctgcgctgacaccgccagcccttctgccgtaatttccacttctccccgtctcacccttccctcctacatctcccccctccccctactattattgttttgttccccagatctgagaacctgagaatctgcacatcatgagtgtgagtgaaccaatgtgtaccccattgattgcttgagtttgctttctgacgcgacttcccctagtaccagagcttaggggacacctcaggcggctatggccagtacaacccatacggaagtcagcaacagaccaatccctatgggggccaggaacaacaaagctatggatatggtggtggttatgaccaggctggcgccgcggaacagggaaatggtggctacggtatgctgacccgataatcgacctcttcgcgacgagtctaattcctcaacagagatgtccaacatcaatcaagcctcatctggtggcccaacggcgattctgaacaagtgcaaggaactgaacgagggtattaccgagttgaccaagaagcgcgagtcccaattggtcgccgcccaaaaggcccttctggactcaagcaccggcaaggaagaccaggcttcgcgccaaacgctcgattacattgaggatgagatcaatacagcgttgcgatacctgcgcgatcaattcaagcgcatcaaggagaccccgggatccggcgatgcgcgcgtacagggccaggttgagaacgtcagccgcaacttgcgtcgggagattgagcagtaccagcgcacgcagagcgacttccagaagcgcctggaggagcaagtgcgccgccgatacgagattgccaatcccgaggctacccccgaggagttagaacagggtgtgcagaatgttctgctgggacaggagcagagttttgttgtatgtttcgcccgaattgaatcttttacgggtcgggtcggttgctaatatttgaggaataggttcccggtactcgcacccgccaggccaacgatgcccgtcaggctactatgcagcgctccgccgctatccgaaaaatcgagcaggatctgatcgaactcagccacctgtacaatgaggtcgcagagctggtacaccagcaggagcctgcagtccagcagattcagcaaggagccgaggagacacaccgcaatgtcgagcaggccaacaccaagcttgacagcgctattcagagcgcaaagaacgctcggcgctggaagtggtacgcgctgatcatcatccgtaagtattacctgtcaagaccaagatctgatcgacccgctaacctactttccagtcattattattggtatcgtcgtcggtgtggccgtcggtgtcaccgaaaacaacaagagcaagtagcgggaaatagtgatttgtctgctgcactgcatcattttcctaccttgtccatgtacgacctgtcccgggatcttctccgcatcttcccatttgtctttgttctctcgttataccaccccttcgcatttccttcttgtgtaaaagcaatgtctttcaacccctctttctttgtgtctttgcctcctagctgtctgtacctgcgtgttcgtgtacagctgctccgcgtctaacacgcgatggcccttgatgattgtcgttatttcggggctcgtgatgttgcggcgcatggatgtatatactagattgttgctttcctccgccccctgtttggcgctagaacctatgtaatactgtctaataattgattccttcgcgcatgagtttgatctatcacgccgtagatataaccccgtagttgaaaagtcctggaatcctgggtttgtgcagtgtaatgtaatgcattccgagtcatcgtttgggggtatccgactcgacacgctctttcgaaataacgagcacctgaacgcccaatcattccgcgatctatgccttttccttcctctccttttcgcgctgctcctcagcgggtgtcttcgtcttcaactgcagtgcatgtagtccgccctcgcgagccatctcttccttgaacaacgaatagaccatacggtgccgagcgggctgcatcttcgactcgaaggaatcagagacaattgtcacactgagagatattagacattgactcatacgccgtgtatggtcggatgtggggaacgaacttgaaatgcgtctctttcgataccgacccttccattgcagcgtggtgcgcatggaggtgagagtcattccggatcacgagtttcgaaggtgtgaatgcatgggtgatctataaaaagggggggagaagttagcaatcgcagtcaacaacagtcaacaacacggaggagtggctcaccttatcgcgcatgacatcctctagcggcgtattggaggccatccttgcagatacagcgaagagacggcgagggagcaaacccggaaggctgcgaggaagcatttagaggaaaagaagaagtgatcaaagggaggaggatgagagagatgtccgcaattgaagccaatcaaatgttttcgatttcggaacgtcactgtcatgacatcagcttgtctttttgctcgagacatctcaattgcttcttcttattcaatgggtttctactattaaagttcaaaatttcaaatttcaaaatgtctggtttactttccctgctttcgcgtacgaatgcgcgcgtctgcttcaccccgcggcgaatgcctctcagcgccagactcttgtcgactcttcccaacacacatatcttccgcgcactccagagccatgacccagaaagcctggccgtcgtgcatagcatctctgcccgatcattcacctacggtaatctaattgccgacaccgttctcgctaaggaggacctggaacaaaaggcccagggccaattggctggcgagcggatcgccttcatcgcggagagcagctatgattacgtcggtacttgctgccttgaatcccgttgaagaatatacgtagaatcctaataagcttacagtgatgatgctggcgatctttgctagtgatgccattgcgctcccgctctcgccggctttcccggttgcggagctgaagtatatcttggacaattcacaggctaagatgctgttgacaactcaaaaatatgccaataaaggcctggaagttgtggacaagggattggagcacgagcctgtgttctctatccgccgtaagctcacagagggcgcctcgagcagcgaagctgtaaccctacaagatttgaagcagccttcgtccggtgggttgatgttgtatacatctgggacaacgaaccgaccggtaagctcagttagttcctgcgcccaatgagctagctaactcggaacagaaaggtgtactcatcccccactcggcagtggccgcgcaggcatcttcactattagaagcatggaagtacacgtcggatgaccggctgcttcacttgcttcccctccaccacatccacggcgtggtaaacgcaatcgtggcgccaatagtagcaggctcctcggtcgagttcatgcaccccttcaatgcggaaaaagtctggaaacgactagcagcacccttcctcccatccaacagctcaagatcacccgtcacattcttaactgccgtcccaacaatctacacccgcctcatggccaccttcccggaactaaccccagagtaccaaaaagccgccaaagaaggaatctccccacaaaaccttcgcttgagtatctccggctcggccgccctaccaacaccgactaaagccgcctggacaaaactcagcaacggcaatgttctcctcgaacgattcggcatgaccgaaatcgggatggcgattagctgcggcctcgacgtcgcagaccgggtcgacggcagcgtcggctggccgctcccaggcgtcgaagcccgactcaccgacctcgaaacgggtgctgtcattccagtggaagacaagaattccaatggcccagaacgccaaggcgagatccagatccgcggtgaaacagtcttcgaccattactgggacaacgagaaagccacgcgcgagagtttcgttcagagcgatgatggaggccgaccgtggttctgcaccggcgatgtcgcgatccgtcgagttgttgacggagctggtagtggagcgagcggagattgggctcggggaccgatgtatttcatccaggggcggaagagtgttgatatcatcaagactgggggtgagaaggttagcgcgttggaggttgagagggagttgctttctctgtatgttgtcacattcctttcaggtgttcacttgaaagatctgtactaacgatggtgcttagtccccaaatcaccgaagctgcagttgttggtctcccatctgaacagtggggccagaagattgttgcggtggttgttctttctcccgacgcagctacttcgggtcataatggtcaaccctggggcccgctggatatgcggcgcgcgctgaaggattctcttgctcctttcaagatcccgcatgagatgaaggttttggaagctattccgaggaatgcaatgggtaaggtcaataagaaggcactggtgaaagaggtgtttggtgcatgaaagtcgaacacactgtacaaattgagagcctacctaaacatatgtttgaggtaggtgatgtatatctacccggagaaaggatgtacaacgatctgcataatagaacattgaagatttaaatcatttgttatattggaaataaccgaaatcgcttgctcttaatcccaaattcatatcatcatatcaaggcctgtgcccggcaagataaaaaaccaaagagttccaaatatccacctagattctacggtgatcctcattctcaatgcgagtagcgctcgaatccacacgaggatcgagcttgttggcaatgctcgagctgtgaggaccagtggtaccagtggtagttccagtgctagaagtattgtagctactgccagcaacagcatcctgatgaccagtagtaccaagacccgatccaccaatcaccgagccaccgggagcggtagtatcgcgagtgtgggagccgtgggtaacagtaccaggcccagtaccagcaagaggagactggtgctgagggtagctgtcacggtccgagtcaacgcgggggtcgagcttgttcgcaatgttggaactgtggggtccagcatttgtgctgctagtgccaggggtaggaatcggaccactgtgggtagcgccagttccagagcccagggtagagccgtgggtgcctgtagcggtgctggggtgagtagacccaagaccaggaccggtgccggtcaaaccagtgccatggatagtgtcagtacccagggcagagccatgtgtgcctgtagcggtggtagggtgggtagacccaagaccggcaccggtgctatgggtagtgccagatcccagggcagagccgtgagtgccagaagcagtggtagggtgagtagatccaagaccggcgccggttccagtcacaccagaagtgccatgggtagtgccagagcccagagtagaactgtgggtgccagtagcggtggtagggtgagtagatccaagaccagtgccggtgaggccctcgtggcgagcacggttatcacggtcagagtcgacccggggatcggccttgttcgcgatgtttgagctatgagggccggcattggtgctgcctgtggtattgtgggtagatccaagaccagcacctgtgccagtcacatcggaggtgtcgtatgtagtaccagagccgtgggtgccagtagcagtggtagggtgactagacccaagaccggcaccggtgccagtcacaccagaggtgccatgggtggtgccagagcccagggtcgagccgtgagtgcctgttgcggtggtgccgtgggttgtgtcatgggttgttccaagaccagcgccagtcacatcggtatgggcagcacggttgtctgaggtagttattagtattgaattctgaaggatgagatgtcaggtgaggtgaatgacaaacctctatcactgtcgacgcgggggtcaagcttgttggccaagttggacgagtgaggtccatggttggaggactttgtcgactcgtgggactcgttcttcttgccagtaatggcctcttcagccttgcgtacaaactgcattttggtagtgatggtatttatgaaagttgaagttgattgaagttggttgaaggtgttatcaagtagatattaaatatggttgatgaaggtaagatatgaattgatctcattaggagaagaagagggtatttatatctcctttgtacatagacatactcaggcaaccattagagtaatgatttatgacgttcgtggtttcaatgtgatggtgtacaagcatcacgaatttaggtgcgacgatccacgatcctctatcggatacgatgtacatggatggatttcttatggagttcttattagctacatggtcagccacttaactcagtgtactgtcataagaatgttaaactggctatcatccttgatctaaacgccaaatatcaaaatccaaaacaattgcgtcatggttcaggctttgccaagaaatatgtatgccaactatatgcacctgggcagtacatatatgtacatacaattgtactcagcacatcctagtaatcctatagccaaccagaataaactggaatgatatcactgtggctaaagcatgtatttatcttgttcttatgtacaccgtagtctcatctttgttgtacgaccttgtactccggacttgtgatagggcgtggaagtcgaagcaaagaagacttgtaactttatttattcattattgaagtttgtagctagtggctcaattgacagatatgaaacatattcacaccgtactttctgtcaaagaatagtcgcagtggtgtagtcgcgtggctacgtcatcggaatttatgctaactagccacttcgggtatatctccgactagccgcaattctcaagagcttacttactgtcacctgatctatcactaactacaaaccaatttcaattaacgagaatggtagaatttcagtactcttttgactgtctttgtagatgttgtttcctcaatttaacaaaaaaagttagggaaaaacgacagatcaatagggtggaagattgaaattgcgaccagcggtggatatacccgaagtggctagttagcatagtccccggtcacatgactgggatatatggtctcttcatcagacaagtggcaataaccatgatattctgagaaaacgtccacgcgtccttcgtctgggatagtcgttcgacatggaatatgtgacacatgtctccttaatatcttaataccttaattcaggacctgcaaagacccaatcccgaagcccaacttagtgagattgaggaagcctacgacttggttattcggaccggtagtataaagctacactgatgagtgattcagtgggacctttttgagggtcagtcaagaagacctctagtcgttgatggcaaggttgcccaggtgctagacctcgctcttccaaggcccctgaaacaatcagttgagcgagataatcagggctgcagctctagtcattgcagtgcaaagtcaagatttatgggccttgctaggtgagatcacctctcaacgtagcatcgctgagaatatatcgacctagaatatttccaagcttcgccattcaacgattgcttaaatccctctagctgacgcattggtagaaccattgagaaaaattaccgaacaaatttccacagcttctggatgtacagtcgttgaaaacgcaagattacttcctgttcaatcgaaaatgaggttgaaaaaagctccgaatctgctgatgtcagcatccggtcgctccggtccgggtggacactccgagatataagctgttcgccatggagttacatacatggacagtctgaattcggtaattcggatctgtggggttgcatttctacgcccttggggatttgtactgccaggcgtagatccggcgttcccccccttgcttgcgatccttgaattttcacatgcgcgacaatttacatcgaaattgttcaaaggagtgtcccttgcaaacaatcataatacaagctcttcccagacaacacagtctttccgcctgaagatcccaccccacgggtcgcgtaacaagccatgtggattgtctcgttctggatattccccttggtatccgggtgcatgtggattggtgagagtcagaacacgagggaataagcttacctgaactaatggccttgtagctatgctggtagccatgttgtcaacctgggcggcggatggaaagccaatttattccaccatgaccgatgggctcaaaattccgtgagtctaatcaatgaaccttggccctcggcgcaacatcgaagttaattcaacaatcagttacatttcccatattggggctgagagactcaaaccgctgttcattgcgggaagtgcagtaacagtcgtattcatggatctcggtctcatctctgagcgttggcttcgtcatgccggccaacttgcccgaaacaaagggaggtttgacaagatctgtgctgttggatcgattcttttctcgatcgctggggctgtaggtctcattctgctgtccatattcgacaccaagcatcactcaaaccttcacgacgggtttttggctatgttcatagcatgctacgtggtctgcgccctcctggtatgtatggaatacatccaaatcggccgattttaccatccgcaagcccggattttgttagtgagctttttcatcaaagctcttttcatcatctgtgaagttgctgtcgctattggatttggcgtatgcaaaagagccggaagaaacaggaacgcagctgctgttttagaatggggtaagttttcagccctgtcagattgtgcaaggaaaagctaacttcagtagttgccgctcttatattcgcattctttgttttttctttcatcattgatctcctgccgtccgttcgtaccaagagacacgttccccagggtgaaaagtatactcggccggatgtggagaatcgaccagttgacttttaagtcgcgagtacagtctgacagcatataataattattccatagatactcgtggatgtcagaatggcttttgccaatgagagaccagttttgactttggccacatgtggtgatatcatccctggggaaagggtgaaaaccccgaatctctcgaaaaggaactctgaacacttcacactaattcaagcaatcaataaattaatacctgatcatcaacatgggcttcttcaaccacctctgtggtttaatctcaaccatcgctcatatcatccaatgcatcagttcatttgtcgtcctcgggatcacagcctgggcagcccgcgagacgaaaacccttacggtgatatttcccttggtggtggtatatttccccaaggtcttatcttaatatgtagagattctaaaatccttccaggcggtcctcaccccaatcctcgacggtataacactaggcatcagctgctttacccgacgtcgcagatggcaggttctccctctgcttctgacggacgcagcactttcttacctgtaagcatgatagtattaagcactcttttataccggtaacaaatgctctcccatttagctggctcactgcattcatctttctggctcaggatttcaaccaggtcagctgcagcatccacctttggaaccacgagatggtatgtagccggaagtatgcggccgaggcattcagtttcattgcattgtaagtgacgttcttttgacgatcaatccactcgctgatcgcacggcagctttactacattcggagctatgacatccgaggttttgtatgcatacctgccgaagaaagataccccaattcaggaaaggaaagatggggcgacgaacctggagcataatctccagggtgccggattaatgaacccttgaacagaaagtacctgtgaatgctgaataacgatgtccaaggcatgaaatccttcaattatataaagattggcgatgcctataggagatgtatatgatacagtattgtacaagtcacccaaactcaagcccactcacccttcctctcgaacggcttcacaaaactagtcgcctccatagtcacctgtagagaggccatatcgacagccgtgatatgagcttcgaccgtgcagaagatatccagcttatctttatctgggaaatccggagggatggtgacggagcagttcacgccaagactggtgatgacgccggaatactcctcgtccaaatgtctaggcctggtacgcggggtgcgtagcagacatgggaatgtgacggggagattgcactcggagaagtagaatgcacggaagaggagcatgcaagcccaatgttgtgcggagtatttgtcgaggtttctgagacgtgtgcgcaggggttgagagtagataaggtgagcgtcgatgtcagatttggagaaggggaggagagagatgggaatggtgtttgtgtcattggtggtgatttcagtaggagtctctgctagatcggcttttgctagatcggtctctgctgggtccgtctctgctaggtccgtctccactagatcgatctctgtagaatctggactatcaacaagagcgtcaaactgacggccgtgttcatgctcgaaacgcaatgctgcctcgatctggtagtgcgcaataacatccgtgtaccggcgcagcggactggtgctcttgacgtacgtatccaagcccagggtgtgatgcttagttgggactgtagaggagtaggccaacggtacgctgagctcatagaaaccctcaccgccgaaattggacaagtttttgttggtcacgcgtccgtactccgggtcgtaccacgtgccgtcgtagacaacggggatgttgcgtgcggcacagaattgaccggagatgtgcccggccagattcatgatcagggagactagattgtcccgggattggtcgcgaacgtcgtatggatcataggattgcacatcgagccggatgactgggtcaccgagatagtggcgtccggttgtggattgtaaatcgtatggcggcatcggggcgtcgcctgactggactgagatagaaagatctgggctaagaggagtgaggtccatggcaccattctttcgacgggtctggcggaatgcgagcatgagttgacgcatgatgtggaatctatctttgtcctcgggccgcaggccttgttggatagttttaccctcaggtattgatggttcggtgaacttgccaccgatggtgaatgattccgactgttcttcagaatcggggtcgaagaagtcgcgcagtgttttgtgagtgatgttgatgacattgtgaattgtgccgtttttgatttcactatccaagatctctcctcgaagattcatcttcgcactgaatgtgagtaccggccgaccagctgccaaactgaagtggggttcagtgagagctttgggaagcatgggataggtgcgttccgggatgtaggtggtgaagagtcgagaagctgcatactgaatgatagggttgtcatttttaataaaggctgtcggattggcaacgtggacatgcacccagaaagtgttacgagatcctggcacgggctccagcgatataccgtcatcaatttcctgcgccgtcacatcatccacacagtaaactgggagatctccccaatcctttctcagatgttgcatggaatcctgcaactggtcggcagtgagcttgctgcaagattcctcaatctcttcccactccatgtcccttgcgagggatatcccatgtccaggaagcatcagatactggtcaaggggtaaaaggttctcccaaggcgctatgatgccgatctcctgcaataaaagacgggttgaagcctcactcagaccaagagtattatacatcccggtggcacgcatgatatgtgttgctgttgatctcagagtgcccgatggcatgacaatggaagggaccgagtacagctgcagatattcaatgatcatttggtcatctgcagtaaatttctcggtaggaagttctcggaacactagcgggtttccatcctgaccaggcgaatacctgttggaggatggtcccacgctggacataatagtcggagagcggagccttctgctaaggcgaatcaaccgctgtgctttagtgatgaaccggttcatagggtggtctttagatccctgcgtgtctttgcgcattgtggcacgaacacaatgttcttggtgttcatgagtccagtcaacgacctgtttgacaatattggcgatccgttttggctgcacgatatacatccggctgaacaaggagctgccatctttttcgatgagaaaaggatgccggcgaacagcttgatggacagcaaacatgttgacactagtcagctccgattcctcaatgccaagagcagttgttgtcaaattttcaaggctcaagcatagaacttcggtatcgtctgccaccttatcatgaagatcatccagtatctgggaattttctctatagaatttcaaaacatgagtcttgaagttgctcatcatcctcagaagaggagcgcccagtggccttggaagacctccctcgggggtcagttgaatatcttgacatgcgatagcctcgttatccgggaaccatggcgtgaggggctcgacaagttcggtaggtgcaaatcctttgataacatagtcaagctccgtgttggagcaaatgcgccaattcccgttgccattgtagaactgtttctgtttgtgaacagaccgcacgtagattccgtaattgaacaccccgtccgcgttcaaccgggcgattaaatcgccctgttcgaggtgttcaccttcaaattcatctttgtccatagcctcttggttaaacctgttcgggtcaccccaagcatcgattatgtctcggccgttaggcattgtgccaatcgatttaccaggtatttccaatggccgattcttggagtcggatcggcgcaccgggtccaaatcattggggttgctatcctgccatttcttcaggtactctcgaatgtctccatgtaattcgaattgggaccgaaggaggatattgccatcgataggaactcttgggggcggctcgtctggatcagctgttttctgctgggatagaagaaagattagcggtgaatagcaaaatcttctttagtatgacacacttcactactggttggaacagcctcagctgaccccaatgttctcgtggtggacgaaaagcatcgccccccagacaacaccggaagatgagtggcggatgcgatcgacgcacattctacgcggttgtgtcgccatgtgcagagcacaggtgacaaatttgcaccagtcagcttctgcaaagcccttattcttgtaagtgccattgccagagcttgcgcataatgaatgcgccggtggctcgaaaactaagtatattatgccggcagttgctataccgccataggcggtatagaaattgtcccgtgattttggtcgaccaatcacattgcaacatagaagtatagaattctgtttataccaaagaagctcactggatgaatagtctcatagttagattatttagattgagttgtagctagtaagaacacatcgatatcaatcgatggcacgcattctctctaggccataaaatacaaactataatctcacagataggccatcgcatagacagtagctcccgaggacatctaatgagtacccttccttgtgtcttaaagtctgtggtagacattctgcccggttccaattcttgtcacaatgcaataatccacaaaaacaatgccaactagtagaatgctgtgggtatacctagtacatcttcaaaccactggtcatttcccaaatccattgactgcatccaggccatctgatctagatctggaatatggtgattgcgactagtcatgtcagagtcagcactttggcatggcctggtccccatatcttgtagctgagaagccatggtccatcgagcttcagcccacagccgacatttggtcaaaagcttaaataagagcttgagaaaatgatcattgaactgaagttccggctctttgctacttagatcgagcttatggagcatacagtccatcgttgatatcaggtcgactgtattccgcaccgcttggcaatcccattgtgggtcttcaagtgttgatagatatttcaaaagtgtgatactcagaatcatctgtgaccaaaagtgaaagggctggccgaaaagtttcgagcaaggaattctgtagaactcgtccaaccacgatttgatattctcgaccgactgccacaaacactcgggtcgttggaattccagtaccaccccgccgtcactaattcgtccagattgatctaaagaaagcgagtctcgacttatcgaataacctagttgatttatgtataattcgacgtattgagcgtgtgtattgaggatgtctgcgggctaagcctgggtttccccaggcgaaggtatcagcaaccacaggggagacaatctgctaggttattcacgcgggaaaccacttacctatatggtagagatctgggggaaatgaagattttaagtcatgcagctgtgttcgtaaagtcttgagatagaagaaacgaggagctgaggccgctgcaggagctgttcctgtacgagtaccacctatctcgtcctgttgtcgaacataatccgctttttgctttaacagctgcaagtgtacttgaaagacaaataattcatccgcagggcatgacttggttagtgtgatgacccgaagcgcctcttccatctgaggcgtccatcgtatagcgtcttgacgaccgagatgtgacgaaacactaggattagtcatagtttgttagtatgtgttgaccgtaagaggatcacaatgattatgcgcacttggagctcaaaataaaacacgctagtaatgccctctgtctttccaaaaagccgtcaggcaattgatcgttagggctgtgaggttcttcagcctgcccttgggtaagagacataatggctttcacgtctggagaggatggtttgaacaaccgcaaatcatatactattgaaatggcgagcatcattaggcgagagacaagatccgctctgccaagaaaggcgtcggtactccatgctaggtaagtcagtaatccaaggagcaagtcgatattagactggacttcgcgcaaagcagacgtgaataggatacgcttcagctcctcaatttgacccagtctttcttgcgtcgagaatatggtaacagtgtggatggcttgaagtaagaaaggcctgttttggcgcagatacgagtttgtcatgtctggggtaaaatcgatgaaaggaaaacatggcagcattcgggatcggaagaaatcgagacgctcatcttcttgggtcagattcggtggtgttgtgacgatcgagtccgtcgcaaacgtcggcccctcactgatattcagcccagcgctggtgtttaccaaggttccattcgaatgagacgtggatgatgaaataatgtttccgtcgagggagagagctggttgaagtggctcaggtacattggcggaagtccccgaagccccctgggaaacaaatgactgcattgcagataataatatctccatcttgtcttccagccgagcgatgcgcgaatcagacgatccggctgcctgagcattgcgtctgcgaaccgactctgatggctgacaccttttcttgagacggagacatctgagagaatcattagctgaatatcatctgattaacaggccggtagtcattgtgacctttcacacttatcgccgtttggggtacgcacacatcggctctttgccttgtagcaatgcgtgcaagcttggccatatgtgctagattgactgagagccgggtttgatctctccatgttgcctggacaagctatgctagaagacaaagtaggtgaacaggattccaagacactttcttgttcaaacggaactccgccggtaactccgtctcaagcggatttggccccgaagtccgcaacccgggcgtaacaaattgttgaatgagtagtataatattagatgttctataagagtatactctcaagttctatccttaatggaggggacatgaaacagctcttgtgagctcacaagagtaccggttataccaaatcgactacggagtgctgcatcggtagaatcgacgtcaagaggcagccttagtagaacaagcattggataaaaaatgctcatttaatattggtgtctcactcgcaagggcttcattaaaaaagaaattcttgttccaccaagccggtcaaccagatttgtagatctttagaagcgtctaggtcgttcctcactggtgaaatatcgacagcaaagtcgtgccagtaatagattcttctcgtttcggtgtcgcgtaaagattccccgatatatcgacagctgtcggtcaacaagaataagcgtaccatcttcgctaacccctacccttgttcgtgcccaattcgccatccctgtcctttcaaggaggtgatgcgccaagccacgattgtcaatcaactatgcgttgctgacatctatcggagacgcggccgaatattacctatcatattagcaaaaaggcgatattagccccaccgaaagtgcgtctgctcatcaagatcatcatgattattgccaaggagtactctgcacgaagtacagtctttcgattatggttgcaggatcagtcaaactgccatctgattgtaagggatgtgtcattcatatctaaaaatcgtgcatagtcgtgctctcgcctgcatactccgttttccgtatgccattctccacgtaacggcatcagattctacattccagactcatctacggactacccgagaataaacttattcctcctatattgcatgtcatataccaagatctagtggtccccgagactcaagctacgaactatctcattcccggtgaactcctccgaagctgggttgccacttttcaagacatgggatgaggatacaccggtaatttgactcgtgcgttaatccatgctcttgattcagcctatcaaaccgcgttctctgcgcggattcgtacatggatctatagttattgagctatacctccctaccctgctctctcgcccggaagcaccaatgcccgacctctccaacctcgtaaacatgccactttcagcataagcccggcgatcctaatcccccaagatatcgtattatttttcctctgaccgaaaagatcgccaaagatcgcgaattggccgggggaaaacgtattcgttgtcgccaaccccgtccaccttcatatgagtcaaatatgattattaacagagctttcttgtcacgagtatcatttcttgattgtattaagcgagacctgacacaagatcgatcgggattcagcatgccagggccaggggcaatccccgcgagttttggcgggttccacttttggatcttttgtctcgcttgatcttgaggattaatttttgttttctcgattgtgtgaataacgccaaccgattatgtacttttttcaatctgttatggctgattgggtgatgccactactgccgaccagtgaagccccgttcgttgcccaagatggtacggaatacctgtttcgacaaagccaaactctcagggtgatctgccgatcactagggccgagaattggacaattgcttcccacatgcaagtttagccgacgacaaggaatttgccttgggacccactgctgcaggtcctggccctatctggcatctggcataagcatatgtcaagatcgggagatggaggtattcgggtatacgaagagcgtagaaacaattgactcggacgacagagcatccgtacccctgccatgtccttccactccgcagctgcagctgcagcctccaagcacagtggggaactcatcacaacattcaatttatgagctctttcgggtcgataagcaggggcacctgctcaatctagactcgcatggccgactccggtctgaatggaatggaatctctcaacaatgcttctgccgagcattcttctcttggattttgtggcttggtttctgttcctgttgggtccaccattcaagaggggtgtggtcagtggcttcaataatatcctccaattatggatgctcccaagccaaagctatcgagaggttatataaactaaatcccgtggaactgatctagagggtgtatataggttaggttctcggtcgtcatccgttccagtcccctgcttgattaatattcctttcttctatttattcctacaataccatatttgctatattgtctactctcctttgacaacatgctctcaagcaacagatggcacgttgtggcgctgttcctagctcttgtccctcggacaatggcagatatctgcgcgacactcaaggccgggggcattgatatcgaagaccgtatctcattggcctacaacaccgacctgaccgagtattggtccgcggcatgcggcgatctcaagccaacatgtattgcagctccatccagtgcagcggagatggcgcaggtaatcaagaacctgaacgacgtggatactctcttgtttgttctctccttgcaccaacagtaaagatgtccgctaaccctaaacagtgccatcaagagcggaggccataatcccaacaatggattttctagtatccaggacggattgctggtttcgactaagaatctagatcaggttgactataaccccacagatcagactgttgttatcggtcctgggctttcatgggaagaagcccagaagggtctcgcgggaactggtcgggctattgttggaggtcgaatgggaggagttggggtcggtggatatatgctcggaggtatgtggatcagaaatcaacaccgactctatctccaatgatttgtaggcggtatgagtttcttgagcacccaatacggctgggctgcgaacaatgtcaaggacttcgaagttgtcctggccaatggcactattgttcacgcaactgaaaccgaaaacgcaggtgggtgacactatactccgtatcaacgccgaaacactaacgcttgatagacctcttcaaaagcttgaaaggaggcggcaacaacttcggtgttgttactgcatacaccgtgcagacacatcctcaagaccataaggtctggggtggcaattatgtttacacatccgacaaagccgccgatattctcacagtagtgcgcaacttcaccgacgagtatcccgatgacaaggcggcaataatcctgacattcgagcgtggtctcgtagttgacctgtgtatcttgtttctcttttacgacggccctgagcccccctccggagtcttcgacggcttcactgctattgaacacacctcaaccgccaaaacctgggatacttactacgacctgctcaagaacaacgacttcttcattcttaagtaagacgagcagcttcaatacttggattgttcgctaaatccctactagggggcaacgctataacatcgctaccgagaccacgcctcttcctaataagaccgtgggagcagccccgctccaggagtactatgagcatttccgcgacgttaccgggtccgtactaggagtaaccgggataataggcacagtttccttccagcccatgcccaagacattttcccaaaaggctaaggaccggggtggagtacgaattttattcctaatggaagaacaaggacgatcatatcactgacaaatccctaggacctcctcgatattccctccgatcaaccgtacattatcctggaacttgacttctcctacgggctatccaccgacgacagtaaggtcgacgcagccacggtcgaactctatcagggaatggataacctggcccagaagaacatcgataacggccttcttcccgacgtgtatcgaccattgtttatgaacgacgcatactaccgccaggattactggggccgtattagccccgagtccaaggcgcttgctctggagacgaggaaggcgtatgatccccaggaattcttccagaagcggacgagtggaggctggaggctgaaggactagacgtcaagactgtctgggcctaggcatattggatatatttatctcgtctataattgtatttacaaagactaagtcaatcaattggttttaattatgactcaagagaaacgtgttggggagtagatgcatgagctctacatgatatattctggtacggggtatacttcccgtggctcaatactaaaaaccctaccaagcagctccaatcggaaaataaacacagtaaggctagatgcattgccctgaaacttgatctactgtgcattttccatcctagtcaataattagatcaaatgtaggcgcctgcttcagatccggagacgcccagggaacgagtggctgagagcgacccgcggcgagttagggtttcctcccaagcgccagggtggattcgtcaatcggacctatattgtatcttatattataattataattatccttccaatggggtattgtctttagcaaagagctatgggatctcctgctaccttaagctactatccatgccgatcgctatatccggtagagggctcaatgaaagacaagtcacccaattgagtacggcgcttctccaatatgtaacacacaaagacacagcctggcttagagagattctagatctgttgctaatttaatctggtctagacttcggacaattgatgtcattgggagacctttgttgatgtttataaaaagccggaaccagcctgttcttcaatctaacaatcagcttcactttctcttcactttctttcagagtacacttcccttgttcttgagcctttcgtttcatacatatctacctcgtcgttgcttgcttgaatactatcccactcatccgactctcgatacatcggcgaatacacaatcagcccggccaattctccaattccattcattattctaatcagcccattcaaaccaatttcaacccccaagatgtctccccgatacggtgccctcggcgcaactttccaattatcccgcctcttccaagtctgctccctaattgccataatcggcatgacagcaaagttcatcagtgtgatagtaaacaacaatgccacacccccaaatatcctaatcggaacgatcagtgtggtaagtctaacctcgtctacactctaaaccctctctagaaattcactaacaaccaacccacagacctgcatcgcagcaatctactgcataatcaccgcgatcctctacacagacgacatcctcccgttcctagcctgtgccgtgctagacactctgctgctaatcgcactgattgtcgtcactgttatcgtcggcaaaccactctcgtacctgaagtgtacgacgctagcggagctgggagataaggatgctacgttgtatgcgtttgcgtcgagactttcgagttatattgctagtgttagtgggaagattgattatgtttcgtggattggggcttcaaaggcgatttgcattgagacgaaggctatttgggggttgagtattggactttggtgagttttgtttcttcttcttcctgagtttctatttattttggccgttgttggagctttgctgactttggattggtgttgtagtattctctttttcttctctgttatttgcaatgtctgtttgtggctacagaagaagaaggctcttgcggtgaagagtatggagtaatgaatggctaggatttggaggcgacgctggaaaatgatatatacggatctatctgtgaggttctgagatgatgacagaaatatagtacgacggaaggaggtaacaataacattcaattttgctggtgctgcgacggtgctgcagcactatataacagtaagtatttcaagctaccaacggaggtactcgtagaattaaatgtggatggcatgtccagtaatgaagtttgtcatattgtatattcggttctctttcttttttctttctttttcgccttcacggaacgagggcgatacaaataatgagggggtgtatcgattccggttgctttcaccaaagtctcctctgggtggagccccaatcattctcccatgatcgccactctaccccgagggctgatagatagacggataaatagccttcttctcgagggaatacatgggaaaccgttctgccaactttgctatatgcctagaagcaaaagtcttgcatctatcccgaactcacaggcggaataacagccacttcgcccccagcctgtataacaacctccctatcttcctcgacatcaacatactccccgttcagactaacaccacaagtagacaggaccttgtgaacaattccagggtatcgctgttccaattcgccaaacaaagcggacagtttcaggggcgcggggagcgattctgtatttttggaggtgtattgggatgctgttgcgaagtagtggattgtgaatgttttcgacatggttgagggagcgaattgactgaaatgacagtgggagaggttatgattgagagtgaaaggtgttgaagaggtcagttggataggcagataagagatggatgaccaatgatctgcccaatgcggggtaactaaatcacactcaatctataagaaccagtcatgcattctatgaagttcatactacatctaaatctccaaatctatctacttcgcaagctcacgaaatgccctcgccaaatcggccttcaaatcctcccaattctccaatccaatgctgatcctcaacaacctccgatcaaccgtcgcatccgtcatggtcctccactcaataagcgtctcaacaccacccagactagtagcatgctggaagaaatgcaatttactcggtaattcacgagcaaagcgcatctccttcataataatagaaaaaacaggcccgaacccattaggcatctgcttcttcaaccaatcgccctcaactttctgtagactggcatggaggacctcaccgagaacagcctgcacagccgcctcgtcgctgtcaggcgcgggattaggcgcatgaagagcagcatcaagccaggaaataagacgggcggcattctcactctgacgctggacgcgtacctccaatgtgcgcagacttcgaacgccaagccacccctccatgctacccatgacagttccgataaagagacggtcggatttgagctgtgcggcccagtcgtcacggttcgtggcgaggacaccgcacaacatatcactgtggccgccgaagtacttggtgcctgagtgcatgacaatatccgcaccgaactggaatggctcttggaggcctggtggggcgaaggtgctgtcgacaataaggtatgcgccacgggcgtgggctttagcggcgtaggaggcaatgtcgaaggcggtaccttgggggttgaccggtgtttcgaggaggattacgtcacctttctcgagttggtcgggttggcagtcgagggggagtttttggagacctgtgaggcgggtgaagagggcgatgacgccatggcagccgtggtaaccatcgccgacggagatacggtgggggttgaggagggtgagggcaccgtgcagggctgataggccggagctgtagcttataacttggccgtatagcagggaggacaggattgtttcgaagcgagtagtatttggtgcggacatgcgcgagtagatgtgggaggttggatcaaagtcggactacattggatatgtgttaggcgatgagatatagaacagcgagtcaacgtgcatacaggagtggcatcagcagccggtactagctgggttggatcattggaataccgaaatgtagtagagagatgcataggaggagcaacatcagtaacgaggttcaaggcatcatcagcatgcaaggagcgcgtggaggcgccaatggcttcgctagaatgggacatgataaaagatgctatgtttggttcttgaattgtatgcacagaaaaagggttcgtcaagcaaagttataatacaccgatctcgggggcgggtgggggaagagggggaaatcacgtaatggatcacgtgttggagaaatcacggggagaaagaacaagagaggtgtggaacacatggattatcgacggatggagcccatgcgggatggttctcgcactgatccaggaagagctgccttgaaggttgcgcgtgctatcgaacaaagttagcgaaagaatagtacaagccagagacacaactcaccagcctctgtatcgaacgcaatggcgaggtcgtcgtgttcgatgggatactcaggcatgtcgaggcacacaaagttggaagctgggttatcatccttcttaggcagtgcgaacttggcatctaccatacggattccgaacttgccggaccgggtgaaggactgcatgatatcagtacccttaagaacaaagttcatacaagttccatggtggaagtccccaaagaaagcaagcatttgaatgactttctcttgtcgaacgatctgaattcgtgccagggaagcttcccatttcttgtaaatcggaaccatactccgtcggcgggagatggtgaacgatgtagccatactagtttggtcagcaaaatcccaaccaaagggctagatggaactcacccatcataaagcacctggaagccagtaacagctgcctcgaaagcatgaagatctagaatagaattagcaaaagcagacagaaatgtcagaagtagacataccttgcatggtggggaagtccaaccggcggatcgtaggctttgtcttaatcttctcaaggaagccggttaattgccctggcagttcagggcgaatgaggttatccgcaagggaaagggtcaggtcctgttgccctgagcggaacaagctcatgctcgtcttgctctggacatccaaaccaattttgagttcgccaggtcctagatagaattagcaattcatttcggagcgaggagatagagagagcccacctaggttgatacgatccgtcacagagccccattcagtggcgacgaaggccctcaaatgttccgataggatcgtcggtccataaccatggtcgacgtaagcatgctcctgatcaaggacagatacgcttcccgcggggaactgaaggtatttgaccgcgggctgaccggtgaatggatcttcgggctgctcaatgcaataagactggatggcgaattcgggcgacttgatctctccctcttgtggaagcatgccgagtagcacagagtgcattttcgaacgctcagccgcctcgtggaaagtcatcaacatagatctcgtacggccgtcctcggtcactttgaggagaagagcgggagcaccgtcttctccccgcaagagaccgaacactatcggtgagccgttgccaaaaatatggcgaatgctgctcagagtcttgacctttgggctggtcaggatagctattcggaatccccgatgcgcattgcgagtaccagtgccttctgtcaccgtgacagatcgctcgaacaaacggactcgacatctttctgtagggtctggagggaacgcctttggtgtgccgggatccatatattggaaaattttgatagtattctcaaataccacagtctcacctgcctctgggtggagactgttctctgacttctgggtgtatttgacgatattccaaagagtcttgaaatcgtcttccttgaacaggacatccaactcgaatcctcggggaagcttgactcgcatagaatgggaccggacttgccattccacatcctcccaagtcggaccctgcttgcgatcggactgtatcaaaatgttgacaagttgactttggctagtgatggccgcaaagacataccaatccgctcgttcgcgtacgatggtcaatgcgcagggcatggcatattgctgttgcccatcatcatcactggagctgacacagacctgcacgaacatgctaccatagctgaagtatcggcttgtgtcacccaaaggcatcatatggaccaaacttggtgtcttgcctgcattatctaccagcattgatctcgtcgccgcaccagataagactgctgaaacatcgggcgcatagaaggggtaacgcagccagatactagtatccagctggctgggagagccttcgtccgagttaatcacggcgaggatgttgtttcgtttgatggacatggacagcgaccggagatgatttatcagagtgtgatgtatactcaaaagatcagccaaatccttgtcgccggtggtactcgcaacggccagtagggcgtcaacacccatagcaccgtatcgagagagttcatgatgactgggcacaatattttcatttatccataatgcctttccaagatcgaccacagcttgcttggcgtaggtaggtggcagtgtcgaacgggatcgggcatacgcttccaaccgtgtctttcctcgtaaaaaccaccagaccgcagcccgaatccattctgctagcgatgtttctaccaatggcttaacctcctctgctgcgagttcgatagaactctggtattgtgtattgtactctttgaattcagaaaacgcggtattgccaacttggttcgcaatattgcgaagagaaaacttggggggttggacgctatgtggtggtggctcttggccctcgcgactggggggtgacgcccggtttgatgcagataggtcttggggtggcgctttggcctgtattggtgaaagcttgccggggctacctgggatgagattcgtaggcattcgtgggtcaatggggctgagactcgctggtgcgcgttctgctgaggggcttggggggcttcggatcgaatcgacaatagatctcatcgacagagaaattgatggcgcatgcggaagtcccgccgttggggctgcttcgtggggcgatccagaattgtaaccttttatgagaggttccgggctaggaggactggggggactagggggagttgagatatcatcgtcttcaactccaggagacaatgcatcttcctcatagcgatgatgcagtgcgcgaccttcttccgcttgcatcttatcgcggacgcgttgtgcgaactcggtatcgccgtggagtttcaatcgagcgccgccgtcgcccgcagacaacgtgctcaggaagtcagcatcctgtggattttgcattagcagaggtttccagtccaatctatcacgctgaggcgaacaaacctcttttcgggatcgcgcatcactatctcccagcgatgtgtcaagtcggagatttggcagttgcggacgcgaaaggtccgaccccggggttcccctgctgtccgacctctcacgggcccgcgaaatctcgattgttggcgattccgtctcatcgcctccttccccaatcacttctgggttttgacggctgaaacccacccgcagccctttgcccttgcgcccaccatgcttggcagaggctggagaggggttggggacagtctgaaattggtctgagaaattgaaagaggcataattatcaaaaggcaagactggcgctgacgccgacgccgacgccggcgcaggcactggcttggcgggagggtgtttggagatgtcttgtgaggaaggaaagcggtgggcagcgacggtttgcggagttggatcgataggcgggggggctgcggctgattctggggcacgagagctcaaaaagtctgcgatttcttgatgctgttgcaacgcagccttatgcttatccttggagaacagtttacttttccaatggggctttttcgcgggtttggcctgctccgcgggcagaaaggagaacgggtcatcggcagacatgacaggaaagatagcgagtagacacagtccacatcgcactcaataacacacagacacacacaccaaggatacccgttgtgaaatatcccctccccctgtgtgttgaaggatcgacaggggctttaggcctgataagaattgggatcgaatagcggggaaggggagatgggagagccagagaggggataagaggaagagatgaaggtgtgtagtataaagggctaagtgcagtgtcgagtgttttgtctcaaaatggtccaaaggtgtcaagtgtcaagtgtcaagtgtcaaaagtgtcaaagtgtcgtcaagaggaaggaggggaggctaatctaagcgcccgtgctccaatgaaagactatcagaaacacgattagccccgaattccaaagtccaacgataaaaagcaaacacttactccgtatagagattagattgtcaaggtagctggaccagcagcgtgagacatgcgatgggtaagaagtgaaagaaggtacatcagggggcaaaccttggaagaagaagccctggagatactccgcaggtaccaattgccgcagtggagtcggggctttttgtggatccgatttagtatacgaaacgattaatagggatgtgcatagggatgttcataggcatgttcatagcgatgttcgtagacatttcacactgctgtacagacatggtgcaattccctatctttcggtctatacacttccacatacctcaagcacccaacgcttttcaagccaccaagggcgctatatatccaatcagcatagacaatttgctcgtctcatcctgaaactccactagacccaatcggattgagggacccgctgctgacgagttttgagagctttgaagatcaaagatattcagtgacattgtcatgttgttaaatgatttgatattgggcatccctgcctacgatctactgccttggtacacttcctactccatagttaataatatgatcaagaaaccgcgcattcctaactaacccatcctcatcatatctaggggcttcttagcgcccgaatttcgagactaatctaattaatgaaaccttggattaattggttcatttgttaatatgcccctaaccctcgtataacggtagcttctttccaaattggaggcttggctgtaatgtatcttcctcaatctggcatttgatcagatgcccgtttgccggcttccccgttcggtcctcccgtttccaatagagtactttgctcaagtctctaatttgctacactcatatattcatagatatgaccccaatggctataaatgtctgcaaccagcgagtatatcgccctttgcttgtcaccgctatgtcttgctcttagtagctaggttctatacggttcattgaccaccttgacttgacccgatggattggaagcccatgaaacaaggaaattcaagatcaaccgtgactcggaccaccccacatgtagacaatcaatatccgcttgtaagacccagcgttcatacctgcatatacaccctgaagtagatcgtcccggtttcgggccctcgggaggccgtagaactgcttacgcttacacacaacgcaatcttacctaacaacctaacattgaaggttaactagttagtggagcctctgagcttgaatacaatatgcgtcgtacaaacgtattacaatttaatgaaagatggtggctttgaccttggaaaatccggggtctattatcctgagctctcaaaggcgtgggggaggtacggagtagaaagccctaaatgtctcacaccatacggagtacttcttgtattcttacaattttcggcgcatgaacatactaaataggtcacttctacgcaaaccttgtgtacataatctctgtttgtttcaggccaataataaacatccccacttgacaagctagttagcgatatacctattatcacgataacactgccgagaaaacccttttttttttcatctgaaactttcaactccaaaggtactatttgcgatatataagacatgaggtatgagacaatatgacagcattgtagaactagtcggaactatggaaagggagagggaaggaagactggaggtatccagatacggtatgtgacattgtgagatattgaaacgccaggaagggcagttgtaaaccgttcgctgtcaccttgtttatactaacacaacacagttcgtcgaggaaggatagaaagatagcgaatgtgcggagtactactagattaggcgagagtttacggctttcggctgatggagctgacggagctaggttcgttcaggcttagacttgtgggtgagaatgaaagtgaaatgaggaagtcgatgtggcgttaatctttttgtcgatattcgcttaggggtgaaacattgtatagccctacggaatacacatcggatattcaccattcagtatacttccaagtttctagaaccttatgtatgtctgaccatttcgagatgaatatagacgactacaacattgtacacaaccgggattcagggattcaaacaacttctgtaccgggagctatatacgagcagggcctgacgccaccgtgattgtctcaccacaaacctccatcggttaaaacccacagtggagttagatagctaacgcaggacactagaccctgaaaggtacgccattatctgtaccttcgttgtcgctcaaccaattccgtccgagtggtcagatgaattcaccagcctcaccccgtttagggcaatgtgccacatccaaccaccactggagaagatatcaccagagagtagcccttcaacatcataactcaatagtatagccgacgccaagccttgctggagactgatcagcatgaataaatcattgaacttcaggcatgatggggccactgatcagttgttatgtagtgagacaatcaataatccaccttcagcgactatttcgagtcggccgaaacatatgagggggaatagttcgagaacccatgattctaagacaaagacataaagacagtcttcctcgtaattgaagacaatatcctcacagcaggagtgaattcatgcagaaactcaggatctcagtcggttatttatctccgggggttcggctccagccgacacagtggatggaagatagattggaaatagttggaaatagtcctaaaataggaggattgcgcatatctcccataattttctattttgagaattgtatttcgttcatgatcctactctgtttatccgtacggagtagaagaaaatagtatagcagcctattattagcacaatcgagtagtcagccgttaaactccaccaaggccagaccaaacaaggcgcagcaacaacaggccaaacccactgcgaaaactaagccactttttttccactttccttgtgttttgctctgacttcgacttccgatcctgcccccgggatatgccgcattggacgacttagcggccgacttacgacgcacgcagatttacgtacctccaggcaccggcctaacttcgaacccccccaaactctatcaggcgagactccaggatccttggtctattccctgcagtgatatttttttgtcaatcacagtgccctattgaccctgggaaggggtgcgcgcggtggacgagaccccgacaccgatccattgtcaacacaacgtggattcgatcatctacgccgggggttgacctccccgaggaggtcatcccggatgcccgaagtggacatgcacgactcgacggagatcgagctggacggacattcatcatcctctcgacggaaagcaagcaggcggccgcgacgcagtggattacacattttgcaaggtcggccgtggcccgacacttcgaaacgccgagcacaaccatggagttcggtgtggtggattgcactgctgtacttagtgagctttgcatcgccaggggctgctgttcttttggactttgaaaattgtctatcaaaatccatcctcgagtccgaccctctacaacttcaattcgttcctaccaacgtgtccgtcaaattcaaccttaccaaccctctacacccgctcgccatcacggtctatggcaatgtgtcgggaaccacgtctcaaaccgcagactatcccgcacccgattcctctgtatggacaaatcccaattggaccgatgggaagattgaggatgtgagcactaccaacaacaagtacagcacgctgatgacggatctcaatgtgcttagcttcacgccctttagcaatgcctctcgtttccgtgacgcggtcactcagggcaccctcccgctgggtccggtctttaattacaatatgtaagctattgcaggaagagaaagctctgcgatttttaactaatccctttctcttatgcaggagtgatttgaccacattacgagcgttctcggttcaacatgatatgctttcaacttaccgtttcggaactatcacacccttattgatagttcgctctggagatgcatccgccgttcagctcgcctgcgttttggtgaacgcgacgccggacttgggaacatctctcaaaagtgccattgcctatgtgcctctcatcattttgatactggtgggaattgcgaccatcacggccgccatgtttagcccttggggcacaaccgatctatttcggtggacaagcaactacggccgcgatgaagatgttctccgacttgtcactcctggatttgcagattgcctgcaataccttcaattcatagtattaacgggctcgctttctttgaattacccaggtttcttccagcctatagtgagtcagggagcatggtcgactctcatgttcaaccagagtttcgtcagcactgaaatcggccgcgatcccgttgtggatggtctatatgccatcaatggaacgtatggcctcgaccgaatgaaccacctggttggcatggcctcatctcaggatatctggcctggtatgatcatatgggtgctggtaatcatggcttgtgtgacggtggtcttccagatcgcattcgcgctccgatggctgtatcgtgagttggcaaacaacaccgatcaggatctgcgtgccagaaacatgccgttcaccatggggaatctcattcgcattgtcttcaattttcttctcttgccaatcgtttccctttccttcttccaattggttattgctcgtcaatcaaccgcttactgtgttgctttggcggccgtggtgatcgttattattgcttgcttcgcgatttgggctatccgtgtggtccttaacactcgacccaaagctcaccttttcgatgatcttcctacagtgctattgtatgggccgctctataatacatactgtgacgatgcagcagcctttggtatcgtcccaattgtattgaacatcgctcgcggaatagccattggtgctttgcagccgtctggtatcgcccaagtggtaatgctggccatttgcgaagttgtgtctgtactaaccctgctggccttccgacctttctcaagaccaacccacatgaacctgtatcactgcctcttctctattgtgcgtttcttgacagttattttgagcgttgtctttgtgccgtcattgacactttcggatgcggccagaggctggatcggatatctgatccttgtgctgcacgccgtggttctcattttcgggttcttcctcaacgcaatgcaaaccttgatcgaagtactggcaagactggctggtgcgggcggtgccactcgtggtggcttgacgaaggtgcttggcatgcgccagctctcgaggcgcactccgcgacgtgatcttactcgccagagtatgggttcggaggctgctatgcttggtcacggtgacgatcgtatgtcatctcagtttgatggatcgcgtcctcgcagtctctctgggagctctggtctgcttttgaaccgtgctagtgatggcagagtcagcaccatctatgattatcccagttcgcaaggaggcacacacagccgtgctgctagcgggggattccccacacctacctcaaccacctatcaaggagctggcttccctagctcgcccagtagtggtaagatgatgggaacaaaccctcgtgatccctattaccggccacctcgccccgggcgaagaacgcccccagcaagtggtgctctcgcgaaggggaagagcccgtcaagaggcttcttgaaatcaaaatcaagccgccgagcagtcagcatcgatgacgacctgggagatggcatgtctggccgtgctacaccagttccagcatatctagcaacgccgaaggatgatatggagctcgatacccctcgcaagccgaaggattatgctgttcgcgaggttgatttctactatggtgtccgaggcccaccgctctcccacagcggtacgcgaaagttgaaaactggcccagccgaccccacaggtccagtctcgtctgcgacgggctggttccgaagcttgctccaagggaagacgaaggacaacgccaaaggatttgaggtggtccgaagtgctcgtgcgcctcctccaggtctattcccgagaagagacgactttaatgatccttatcaggatgatataggcatgccatcagccagtcattctcgggaagtgtctaccggcaatgttccctatcaggattcggacaatgaccacgaccccgaaccgtcatgcccgccagtactgccacaaattaatacctcaggtggcggtggtatcgaattgcccagtcggacggcctcttgccacacacaggcgcctggtgaccaagacgcaggaactgcggctggccttccagttgtgaccgagaccctgtctcacaactctgatataagccagcactacgagcactccgagcaccatctccagccagaaggctccaccaccgcgcgcctgcctttcagcggaagtagctcgccatctcgtgaacgaggtctgtctatgacctctacttcaaggtcaagatcaaacgcctcgagccagcagacgggtgctcgaccctcgagtctgggctatgtacctcaacatcgcgcgcacgaccacatccacgaggggagccccgacgagccatcctttaaggggagcgcagcagaacttgtcgatgaagcttcgctgggcgggcacgagcgttaaaagtatgaaaaaggcagtcacatatgtattttgaaccactatattcgtcttcttcgatatctacctctctctatctctgtctcatggatctcccgccacttattcctcatctatggatatcgtcaccaccatctcctgcccgaaataccggcgaattgatgccaccatcacgaatctccttgcttcctgtgcgtctatctcttgctttgtttgtcaacctaaaattgctgcaacggcgttttatctctgatcccgaggtacacctaatggggagtgaactcattggcttcttgctatcttcctggctgtcgctgaatccagacgacatgctgttttcttttggaggctttgcttctttctgtatctgtctcttttcgctcttcttgtatcaatcttaggacacactaatgccgggatcataattaatgaggacttttcattagcgcactctcttagtggtaataataaggtcttgatatgtcttagaactagtaatagttctcaactatataagcaacgtatatcttctgttgcaattatcaattgaactatgggaggcttcgagcagagcggaaagaaacaaccgaacccgatagcacgcgggcagaccgggccgataccgtcaatcgccacctccctcaccgcccgccccacgataacagcctgtatctgggcccaaacataacgcttgcaccatttcctctcttgtctctgtgagtcaagtgtcaatatccttgttttcttctttgctgttgccatctgctgttgccatctgctgctggcatcgctactgtgttgctggcatctgagagcatagtcacaagactctcagcctcatcatctcctaaatacgacccaatcagccttggctccatgataagcatcatcctcacactccttaatgtgatcttcggcaaaaagcgtcaacgtcattgaagctgagcccaggattgcataaaaggacctcatctcctacacctatattctcgacatccccgccatatattcccctcgtcatcgccactcgccacctagttcatgaagactgtcattccaacggccgagatcgatctcgttgcctctgtcggacagaatatcacagaggatctataccgttgaacttagcaatcatgcctgggtcaagcacggcatctagctcggttcagtccagctccccgccgaggatgcaggcaggcacgaggccggtcgaaagaccagaggggcacggcacaacacaacctagaagctacagcggctatgaagaaggcagctccaggacgagagtctttcccattcgccccaggtcagaacgtaaaagacgattgaccagtaccggcgaggatgcgaggtcgcaatggggacaatctggaggcacggctggaccggcccgagacaatgggggaccctccagaagtatcttgccgcatagatctgtctcgatggtattgccttcgtctcgtactagaacttctatatccacagcacctggctcgtcatttgcaacagcaattgatatctcttcctctcccccagggacgcctcgttcctctaattatggcgaacaactaccgggtttctctcgacgggagcatccaacaccctggattaatcaatctcgctccgttgcatctgttcacaatgatctacacccaccatttatggatatggctctccccaaatggcaggcagattcggacgtgtcagaatgtccgatctgtggggtagtattcagcttctggcacagaaagcaccactgccgaaagtgtggaagagtcgtgtgtgcatcatgctccccacatcggatcacaattcctaggcaatatattgtccgccctcctgagttcgttgacttccttcctgattccccgccaattccttccaactctccatcagtcgtcgatctcacaggcgatgaccctgttatatcatcatcaccattatcatcaccatcagcatcagtagcagcaacagcagccacactcaaccctgctcttggcggaggcgaagaagtacgactttgcaatccatgtgtgccagacccaaacccgaatcccattagctacagtaccgtgcgggcacacggccaccgacccacccattctctttcatccactatggccaacacataccatgcctcatcggtaagttctcgccactttacttaataaaaccaagctgacaagaaaacacgcagggtccaagcaatcccgaagctcgtcaggaacgacgaactgtgggtgtaaatgatcgaccgcagttcttaaatgagttgaactcgcaaactcgccaagttccctcgcccaccgctggcatatcccgaccacatcgttcattttccaaccgcgacggtaacccaacccgcggacctgcgttgaacgaagatgatttctgccccgtatgcagacgtcaatatcttccactgagtcctgaacagcctctcgaggcgcgccaagctcatacccgagcgtgcatcgagggttatttgagaccaactgccccgccccggacatcatccttgcaacatgatcatccactgccccatcctccaccggtagcccgtatgcttccctttgtggccacggagaaagactgcctcggtgaggatggccaggcggcagagtgcacgatctgtatggaggactacgaggttggacagaccctggcccgccttgagtgcctgtgcaagttccacaagcactgcattgttgactggtttgagaggaagatggagtgccctgtccacaagttttcctaatagggtgcacatccatctaatatgaatttcaagaaatatttttgctagcttagctttttgctttttactacttttggctcacggcgtctggtattttgtttcttatatcccgcttagcgtatcaatgaatctaatctattttatctcgaaacctatcagatgctgatgcagatgccgagggtatgtaggatcatcagtcacgtggcccctgatgttagttgaaactcaaaaatcaaaagcacttcacttcacttttggccccaaagtgaagagcaagtcaaacaggacccagtggtattataagtgagaggtaagcctggtgttatgcattccccttacttgacattattccgatgaggtatgttgatcctccacatcggtggtcggtgtttgtgatcaccgtcctccgttttctcttgtcgcacagccgaggtgtcagcaataaccacactgaaaatgggataccgagcaatcacgtctactgatgaagaattggaattaacgcgaatttgtaacagtgataggtccccgagccggtattgtaatcccgcactgcatggaaatcgatccgcagctgcaacacgcggaccctcagcggtctttttatacaccgatccgaccgacaatgagcacaggcccggaatacccggagcccccatcacacgcacccctcaacccttacccaagccgggatacacatggtgatggacgcggacacgaacatgggcctagggacacgcacccatcattcgggatgggcctagacagcaaccaatccccagatccgcatgacccaccaggcgacgccaaacggtcgcgtgcatgcgagccatgccgacagctgaaagtgcgctgcgacccagacccggcgcacccggaagggtcatgcaagcggtgcgcgaaagcgcggcggacgtgtgttgtaactgcgcctacgcgcaagcggcagaaaaagaccgacagtcgggtggcggagttagagcggaagatcgatgctctgacggcgacgctgcaggcatcaaattccaccagtgcgctgttctctggtggagcggggcaacgggatgagcagcttgctggtcgaagatggattgctgggagcaagcgacagcataccggcgaactcaaggatccctctggtgggctgttagcgccgcggtattcgcggccgggtagtccatctgcagagcagattcctagccatgcatcgaagcattggcgcagacctgttggtgttgattctgcgccgccgccgccaaaacatgaggccgggaatgagtttgctgatatgatcgatcgcgggattatagattacaagactgcaagcgcagcgtttgataggtatatccaccagatggcgccagagttgccttttgttgtttttccgccggggactacaatgggcgaggttcgccgcaataagccttatttgttccttgcgatcatcgcggctgcggttgccgtcttcaattccgacgcacagccgatcctcgtgaatgagacatatcgtctgatcgccgagcaggttgttgtcaaaggccaaaagtcgcttgagctggttcagactataatggtctgttctatctggtatctcccacccgataacttcgacgagatcaagttctattctttgatccatatggcggtggtcatggcaatggaacttggattaaaccgtcgcatttccgataatagacgcagcttcagcgtgatccgcgaactgatcattaaaaagccgacgggtccggcatttgatccaaagggaccggaagcaaggcgaacttgggttggctgttatttcttatctgtccagtgtgtttcaatccgggttgttatggtatggagatcgcaagctaactttggcaggatgtcggcggctctgagaagagtacacttggtcacctggcagccgtatatggacgagtgccttcagattttagaaacccacccggatgccctaccctccgatcgaaacttgaaatggtggataaagctgggatcgatcatggaggatgctggaaatctcttctcggaggaggatcctgggtgcattaccaccttcgcggacagcaaggtttggtataatattaaaatgtttgaggatagattggcacaatggagagaggaggtcccacgggacgtttacactggtaagcgctgatcttgagaatattctttaatattctgctgacatccttctagagccaatggttcacgcagaacatgtcctgaatctcttcgtccatggatctgcaatgtgtgtggactataacacggtcaacaactctccatctcaggatgatttgcataactcatcgattgcgattgatgcgttgagcacggccatccgctgcattcacgagagtctagatgtcatttgcaccatcaatattgaccgacttatatccttgcctacgacatccttagcgcggacatcgtatcccgtggttagtttgataaaaatatactcactgttcatgtcgccggacagtcgaattggtcagattctcgacgtgcagagtctcaaactcgattattatttggacaaagtcatcgcgcattaccgtgccgccgctgcgcgcgatggtggccgtgcagcagcgagatttggaaacataatggttctgttgcgcaattggtttatcaagaagcgcgaccagggagatcatggccgggaattgaaggaggtcttttcgaatgatcagaaatcctccgatcaccggcaggcacgtcataaccctgataccccgaacgcggtatctaccaatccaagagcgcggatagcaccgggcatgacacccctccatttcctcagcgaagtagccatgggcgacccagcgcaccgagcgaacaattccaactcccaacgctcgatagccggacaatcttattcctcaaaccacagtccaagctcaacagtcaacccaatgccaacgccaagctcatccaatttcgtgccagatccaccccaaaccagctggtcatctagctcatcatacccaaccactctcccgagctcagactcgaaccatatcgagacgaggggttactaccaaccctatccatccaccgaaatcacacagaattatccagatttaccatcgagtacccagactcagggataccctgacatgtccaccgtggctggagtgcagcttgctcctccgatgggaatggcacccgaggtaggcatggacccgaatttcggtgatccttggtttacgttagggaatatgatggacgagggactgtttacattccctctttcttttgacgggaatttcggattgttttagtcggcttattgtggtgtcctgtctcctttgctcattatacccgttgttgtttcgaatgtatatcaatttcactcatcgcaagatgcatcatcttcgagggataggctcggagggaagccatgccttttcgcattcagtcactctcgtaaggggaacaccaaatctaactaggattagtgaattacgaggaacacttcatctaggcagtaagagtaaggcttattccttaggaatagtctagtgaacagtataacggcaagcaatgatttcctctgatgtattgagaacgagaaacctacgcgttctcggctacggagatttacacccctcatgtattccgtgggactcgtcaaatggcaannnnnnnnnnnnnnnnnnnnnnnnnnnnnnnnnnnnnnnnnnnnnnnnnnnnnnnnnnnnnnnnnnnnnnnnnnnnnnnnnnnnnnnnnnnnnnnnnnnnnnnnnnnnnnnnnnnnnnnnnnnnnnnnnnnnnnnnnnnnnnnnnnnnnnnnnnnnnnnnnnnnnnnnnnnnnnnnnnnnnnnnnnnnnnnnnnnnnnnnnnnnnnnnnnnnnnnnnnnnnnnnatgcagacctacatggacctcatacatatggtaatgtcatggtccctgtggtaggtgaagcaccatctgctacagtaccctttgcctgcgctgtctcatgggggctacggagggatggtggtcagagggatggggagaggagaagaagaagaagagaagaggagaaatggggggaggggtcattttatacctcaagcccatgtgccttcctaaagtgcgacaggtccctcgcaccttccctggcaatgtcaatgtcacatgtcacccatgtggatgatccgatataaacatcccaggttatatcgacatcaacatccattgaaattcgtacgtctcggagaattgcattctccgcggctccgtacactttcagcacagcttcgcaatcaagatctactatacatcccacattccaaaccagagcaataatatccgagaagagcatatcctattcgtggcctgcagtcaatttgacctgcctccagtcaaaatggcccctcatgaccccaaccgtgtcgctagcatcatgctctcatggcactcgctcgagctcatctcgtgcaccaaccttcaaaccctatgggccgggtatggacaaatatgcgctatcacagcgcgagccaccacctcccaagcagccgaacatctcagcaagctgtgcggggtagagcctggtgttgtggggacgacgtatccccttatcctgaaactcatctcaccgccccgaaaaagcgccagcactgcagacgagggccatctacggaaaatgctgagctacgaggtggaacagtacttctatagcgaagtagtccctcagctgagctgcaacacagccatagccaaatgcgttgcctcgacgcgcgacatggactactcggcagactcgtcggaactcagcggtcttatggctacgatcatggttgatctgcgtcctgagttccccatcgcgggtgagaagagaggtgcgctgaaccgcgcacaggttcgcgcagcgctagactggctagctggattccacagctgctcaaggaaactactgccatctagtcttgacggatatattctgccgccgcttgaagaacgcaatagaagacagagacagagcccagacaaggatgttggtagcgggctgtggctgaatggggggtatacgtacctcgcaacgcgacgtaaagaatacgcatctcttgcacaggacacggactcggagtggtcagatgcgctgtgcagggtatcggaagggtgctcactatccgtggcggagatggttgcattgttcctaacgccctgcgggagggcaattgagtcttatattcatggcgatgtcaagtcggaaaatcttttcacgactactaatggagacaaggtggccttctttgacttccagtatgtcgggctcggtttgggagtctgtgaccttgccaaattgtttacctgctcggttccgctgcatatgctagttgatggaaatgggagtttgcccgcacagctgtcaatgtgcgatgccgaaagggcactgctagagcgatatcgtatgagtctcctccaagatgaggaatcggaggagtcagagctatacgaatgggaagcgttcaaacggcactgggagacagctttggttgattggtgtagattccaggcttcgtggggattttgggggaatactgagtggcttggggcccgtgtaagatcaatcttgaatgaccaggagtggagagactggctgtatcagaatatccgtggtcgagtgtaggatcatataaatagaaatgcactgtgaatatatcttcaactccatccagcttttgaatagtgaaaatggggagatcagcggttatttgaccttcctacttaccagttgtttgtatgacttttgcttgatgattcgagataggtcctgtttcttatgctgtcgcagaatgaaaatgtagtatgatcagattggtggagctgcctgagcctcacagcacgatcagcgcctaagaacaattctaattggtctatatcatattatatgtaaatcaactgggtatataactatatcggcctccacgcttgcataacctggttgcgcatatatccccacggccagccgttttccctttcagttcgacgaaggaggtcaatcagcaaagtttgtacaacagggtcttccacccatgagccgcctgtaggcatattagtaaactctccctcatagaatgcgaacaaaacatacaggcaaaaagtgcgtgacaagccgtgatacgcagtgaagggtcgtcgtcggcagatgtggcgatgccgaacataaaattaagcgtttcggccagatcatgctgtcggagtcagcataaaatcgaggtgtttcaggggggggggaagacaaacccttaacttgacaggctgctctaaatgcaacatactccgatcataaaactcaagttcgcgaatgagcaccaacgatttagtgagacagatgtgctggaccgcagtagctagatccaaattagcacctcatccccaacgcaggcttatatcacataccatgccacaggctcgtataccacgcaacaggaaaaggtttcccattcccaggatccgccggcgagatatgcaacggcacaaacgtatccggtcgaccaagctcccactcaagaatgcggtgcctgagcgcagcctcccccgcactgccaagtctaccgtcatggcttcggccggagatattataacagaaatcgatagtctcggccaatagccagattgcccggtttgtccagtctccgtcgctcagggcaggtttggcggcccaccatcgtcgcaggcggtcatcgaacggcgcgaatgttaagcggaggcatttctggtacgtgagcgcgaattgaatatcttgaatgacataggcccagaaagaagccgatgccagtccgcccgagatagctgagtccacgtgggaactgatgtataccgaaccggccaggagatggtgttgttggtcgtttgggggactatgggctgttgagtgcgttagccgggggtaattattttgcgttgaagattggtgatccacgcacaggagattgattcgaaaaatcgtagaatgacggttgacgagaggaggatgtcgattccgatttcgaactcgggcttgtcgaggaccggcaacattattgagatacagcgctcatgatatccgtgtgcgacatcgccggcgatggagttggttgttcgggataggtgacatgctgagactgcgagacaagcatacagaagtaatggggattgggtcgcgcgctcgatgacatctgttgagaagtgtcggtcgggattgaatgcatcgagctgggctgttagtggaaaggcggcgaatgtgataacagaccaacttacccacggcgccaggtacttttgaaaatgtcgcaacagaaaggcttcagtgacattggatagcctcgggtggccaatgggcgtgggcgtggtggttgcacgtgacgaattcccagaattcgatctagagcccaattgagatcctgcaaaggcaggaaggacgagggttggagttgccaatgaataatccatcgtcgatggaggcgtggaattttcagacgatgaccgtgaagtcgacgcctgccttgtcacaggtacaacatagtattccgctgccgtctgatctgtttcgtccttgaagtggactacaagaaatcagtataggaaacagacgcggagaacattccacatacagctggaggacgtttcaacccagacctggtcgtccgggaaagcaagatcactctcgccatatcttggaggcccctttcgcaaggatgggttctggccgtgtcggaaagagatctcttcagatttgccgggggccggcacacattcgcgaccagagcgttgacagcggagacatttcgaaccggatttgtcacctaattctgttagtgccgagagcagagattcggagtaggcaacgtacatttcagatggcgcagacgacatgtgaggctgaaacgacgggttagtcgaggtcgagtacgcgtaacgaatcacaagaactgaccatcccctcattacgcagtcaaaaagtacaatcgcaaacaaggaaatcttccagaaagcatatttggaataccaggcccgagggtgagatatgtaaatagggtaagtcggccagtccgactatcaaactcaaccatgatgtctattgggagactaaccaacgcccacccaggcgagatggtgtggggaccgaaaatttggcagatcactaacggattgcgtattatttttggggtttaccagcggctacgttttaattggagattagttcgaagagcttagagctaacagtggttgaaatgtcgaatagcgggtttcaaatgtactggaaattagctcaaaccatatcccgaatgtggaaacgttcaatatccgagctcatcacgggtctgaaaaaggtccaatttccacgggagtctaggcagcctggcgttggtcgtggttgggcggctggcttccccacatatcagactaagtttcatcgaaaagattctgatcgtttacctaagaaaagatcctgtgacatgtcatggaagttccggaatcgggttctcggcatgatagttggccgagacattggaagttgcactcggtacggaggagtttgaccgggcctgttttatcctctttgcctcttttccttttgcctcgttgccgtcaattgtgtctgcaatgtagagaacctattccgaaagaccccctcagaaggtatccggacataaatcggtataaatccggggctgattgtcaggtcagaacttaaaacctttcaagataaaaagacaaagcgttcgacaagcaacgggaacgaaattagaaacgaaaataagaacgaggttagtgttgaagtcgttcggggtctcctttgccgattggcctcaccggtcctggttcaggcaccgtacggtccagccacatggtacggaggaccgacatggatcactcacagggaccttctcatcccatgacaaggtgcgccggcaatctccgtgtgaggtaggagtaccaggccttgatcaatcctggttgtcggtggatcttcgatgaaaatgagattttaattccaaacccgtggaaaccctgtcgatctcagaggcacttcaatatgttgtacgccgaacagacgatcccacacctcccgatgctataaagttaaaaacggtccaaacaccagacaaatgggatttgcatatgtggggggctttctgttaccagctgcctctttcggccaaatgctccggggcgaaaagccacttgcattattcatcatttgatcagcaccagaagtttcaatccacggttgaattggagcaggaacaggagaatgaactgtgtggggagaggaagagagacaagagagaggaaggagagtcatgtggtgcctgaaattggtgcctgaaactgatacctccaagccttgaatccaaggcatccatgcatatcccaaaccaagctattccaacttcgaggtttcttatctttggagctccctgctggtctcgtagcccctgaaaagcttgaattaaacaactgtttccgttcactactgtggtgaaactgagtcaatcccaaaatataatgccaaatgtccctaaatcgcatctccttccttgaaggatgggaacgcaaccccgcggccatcctcagccaccctggatcggaggattcggaccccgactcctaccaggatctgcccgagggatccatttcatcttcatttccctccacatacagcagactgaatttcaacccgtatgcggggccaggctggaatgaaagcccagaggatccacacgaggatcgatcctcgtttttcgggccctcatttctgggcttgtctccgacgactacccccgaaggacgtgcgggtccggctccagtgccgggactgggatctgctgagcggactgcgcatgattcagagacgaccgttgctcgcacgccgccttgggccgatactactggtgcttatgaagtgagcgctgctaggaggattggtaggttgatcgaactcgcattatacttcttttcatatacagtggcatgttaacattataaaagcccaggtttgcacggcagtcgtatactgttttctggcggccggggttgttttcggctttgcagctctcaagcccatccttattcgagagaaagtatatcgcgacctctgctcccaggcggaacttgagaaagatgtcgatgtatgctatgggcaagagattcggtatgtttcccccgtggttgaagatcactcttacttacacgcaacaggctaaacttgatgtttactatcgccgctgtagtaaccaatgtctcagccctacctgtaggcacaatcctagacacgtatggaccacgagtcagtggaatcatcggcagtatctgtctcaccataggagcagtactttttgggacagccaacaagcttccattcgatggatacatcccgggttacttattcctagcactgggcgggccattcgtcttcatcccatccttccatctatcaaatacattccccaaacgatcaggcctgatcctatcaatgttgacaggcgccttcgacgcttcgagtgctctattcctgcttttcaggttgttgaacgagcacacgcatggcgtcgtatcaatcgacaatttcttcgccgcatacctcatcgtgccggtattcatcatcgcagcacagatcttgataatgccgtcaacatcatacaaaaccgccggcgaactcgtgcaacaagccgaagcacaggtcgtagatgagatgcgcgatcgcatagatgacacggtcaatgaccgcagcgagcgcgagcgccagcgtatggacagacgactccgtcgccaaagcatcgtcagccagatccaaggtctactagatgatggcacagcatccgtaatttccggcaatggcatcaacgactccatcttccacacgaacatcgacgcctcgctcgacgtaaataccaccacaggagttcacgacactccaacaccgccctcccaaacgcaccaacaaccaaccgctcctcatccaacaccaggcggaatatggggcgtgctccacggccatagcgcactgtaccaactacgcacaccatggttcgcactaataacagccttcactgttctaatgatgctacgcataaattactttgtcgcaacgctgcgctcacaatacacctacctgctctcggccgagaaagccgcacaaataaacacaacattcgacattctcctaccagtcggcggactcgtctccgtgccgttcatcggcacattcctagacgtattccagacgcgcactgtgctcttcatccttgtcgtgtcggcgaccgtcatcggcgtgctgggctgtataccgcatccgaccgcggcctatgggaatatcattctcttcgtgctgtaccgaccgttctattacactgctgtatcggactacgcggccaaggtgtttgggtttgcgacgtttgggaaagtctacgggcttattatttgtcttgctggtgttgggaattttgcgcaggcgggacttgatgcgcttacgttgagggtttggaggggagatcctgtgcctgttaatgttggacttacggtgctggttgctggggttggcagtgcacttgttgggtttgttgcttatcagacgagtgttttgagtgggaataagggtgacggtgagcatcatcaggatgtcagggagagggagccgttgttgaggaatgaaacacctgggagagtgtatggagcttgatcttatgggcttgatatgacggaggcgccttgtttgtattaagtatctaagaatgattatgaatgtgaatgtgattggatatgaggatggcacatgggagatttaaggatatttagggaaatcctacaagcactaatacgagaggaccatagcaatgaagactggaatatgaaatctggagacgtgaacattagaacgttatgtattatatctcgaatggttgctacccaaatagagatgtactatatacagatgtacccaaacatccaaagacgacaatagggcgcgaggaagccacagcctatgccagggcatattataatccagatccagacccaagagtggatctattatatccagtgcaatccaaaaaggaagaaagagtagtgcccgggcccgggagtgtttgtgacagtgttcgggtttcacagcacggcgagtttaggcaggtttacgcaaaatcgatatgcccagtgggtatatctatgtatgccccttgtccaagttaatatcgctggtgattgcgatgatacaagcccaatatatttttgtatgtccatttcaaagaaaaccgaggatgacaacgatagtgaaaatgagattcgaaggacggtgataagaaggctggtctgcgtcattgcagctcacggcagatcctgggaggaagcgcgtgtattcgcgcttcatgaggttcggagagattcccaatgagggaattgggctgctcattggatggcatagctatatttactagcgccctcctgccagagatcctctgcagcgcggtcacaggcagcttcgtaccataacatagttgcgaggacggatttgatgctggcccatgaattcaagccagtcctgcgagttacatctcccagagcagaggcaaaccaggcgcgctcgggagcatcgttcgctgcgataccgccgagggtcaggacccagatgagagggacgcgtgtggatggtgaacaccacagctctgaggacgagggtttgaagaggacggcctgtataaggcgcgccagggtactgaggggagtattctgggcggggattgggaagagaacgccgaccccgaatattagtgccgctagacggcaggcttcataggtggcggcacgcgtgggatgagagaaaaaggtggagatgtctgaggctggagagagggagaggagggtatgttgggtcaggttacgctggtcggcgagcaaagaggtatctggtgtgaaattcaggctcgctttaatgatcccgatataagtgtgcaccgcttggaaggcttctgccatttggtgggtggcgccaatttcctgcaaacggccgaatccctggtcgacgtctgatgggccgaagccgagcatttcttggacagaccagcctaatcgggaatcggcaaggggccagaaatcgaagcatgggtggacgcagaggacgctgcagctcatgatatccgagctatgagtggtcagtaagggcagtcagtaagaaaccaaaaagaaccgagacatacaaggaaattgtcgcggcgagaccctctgtggggatatttggcaatccacctcgcagtttgaccaactgcaacagtcctttgatatggatcatattcggtggcagacagccgtagacatcaatccattgtagtcgcaggaaaggcggattaaacggtgttctgcggtgctgctgtaccaatttctcctctgcctgatgatgagccatgcaaatgacactgaggagaacagcgtcgctgaccgcgcgatcggggtcacgaacagcctggttgatcagcttgatcgattccatttcacacagctgcagcgcacgacgctctctctgaccaaatacggtacccggcacccagttattctgccattgtacacggaggtgacacagcgagccaaacatgaaggctgtaaataaagccgggtccgccatggacagatcaaaccatttattagccgcagctctgacattcagtggccgcggagcgagtcccggccacacaacacccgtaagatagcgctctgacagattgatcatctctggctcgaagctcttcggggcggggtatgttgcaaaggggtcgaagactccagagaggttgcgttcaagccgctcaggagaagagcgatcattgaaccggatgacagccagcgcctccgaggagaacgtggtcacggtactcgcatcgtcgctgctactgctatcactgctatcgctggcctgggatggcggaaacggcgagtctcggtatgcagcctggttggagcgggagttgtgcgcaaaggtgaattgaccggggttgctcccccgatgggagctcgagggacgcgagacgagggtataggagggaccgggaccaggaccgggaccggcgtgcgcaacggcgggtaaggcgcggacaggtcggatgcgtgaactggatgattcgcctgcggatcggtcctttgtttctgaaatccagcgtccgacatgggcacgcaccagacgctgggctttcagtcgttcggtctcggaggcgggtctagcattgacaaaatgaatgctatccttcttctgtttctttcttgacgacatcaccggctcggcaagcggtgagagatatatgtaacagctagatcctgcatgatctttccgaaggggaaaagaggttgaagctcaaatggaggtttaaacaaggtgatcggttattgatattgacagcaaagccctatgtagatcatatcagacaaatttgacaattttttgtgacttttgacagcctcgaagatgtttgggagtggggaagaaaagggtaaagaggaagaagcttgggagctcccgtgaccgcagatcaatcgcgtacttttacttttatgatactccttttttattatattcgataattcggttctattatttgcttccaggctctgattcaaggattctattactagtacgtgcattctgacagtggtggagtcttctgcatgtgtatagtgactctatattgcacggagtattctgatctattctgtctgaagaggacctcctttcatagagctcaaggaaaaggactccgaatagccgttcaatacgaagtcgatcctgaaataagattgccaaacagggggttctcctttcaatgttcttgggcccagtcattccccgggaatcctagtatagtggacacatagaatgtcagactattgccacagcttcttttatttccatggatgctatgacactcttctacggtacaagcagtccccgttgcaattctatatcccccgcggtctagatgtctttgttcgaggggaattcctattacaatccgtggtagtggcagggtacgttgaactgccatatcactacattattatatacggagtgcgtcaatgctcgacggaaatatgattcccacggggtttgaccttttttgataggcctatggaaaagaagggaaaagaaaagtggctctgataggtgggaccccgtcgatcgtgaggttaatcatcttggagtggcaattccagtgaattcgacggagtaagtctatgttgtagatacttggaaatactattcattatgtctgatatagaagcacattgtaattgaattgttacatttagcctctttatgcaatttacatgctaacctagtctttcttttccacgtttgccttttccccatattatagagcttcattgttcctctgatgcaagccaaccggaatatgagacaatacgtgcttgattatgagtccagtcagcggccttctggttatctacggaatactccgtattccgtactccattcacacctcgagtgacgagtctcctcggccgaaacggctaacaatcactatgtattcctcctagtgaatgcagaaattcctttagctacaatttcccacctgtaaacaccgtgctcggatccgctaacccgcagtttgtgacagtaaagccccggttgactccgacgtcccctcatcttcagtcctgccgtaccgaagatctgcaggaagaatatacgtatagcaccgagaaagtacgtgaagaaaggctagtggagaggtctagacaatacacagctaatcagcgtggggtttgacgcctgacatgagggatatatgatatgtgatggcatggttagggttagcgctgacatcaggtagggtctgcatcgactaagactcaggtgacaggtccactggcattggcccgtcgatcgacgagaacatattaatatttagctagtccgagtacggagctggaaaggatgtgtgtggggatataaacgattgaagtaagaaatagcgaattgtcgagttcacacaaattcggcacgaaaggcctttcccgtgcagatcgacgagaattccgtgcagatcgacggagacgaaaacccaagagaatccccacagacatgtcaacaggccccccgcatatcaccacgcatagcgccgttacactgcatttatccccgtcactggaggaattggagctgtcgagaaaaaaaggagagagaattaaatattcgggaagaacggtgaactcgacctcgaaggatttcattgtctcggctccgacgccgctaagaacccaatcatcctattgacagcatacgagactataccaaatacgatctagctacatcactggctgcatgcactaacggggggataatataatatactccggactagtccggaagatctccccatcgaattaacgcattccaggctagtccaacttaatcaatttccaacagggtatatcgacagctctcactggtctgtggatcatgatactgctctaacgccttctccacagcagccatgtagccaaggacatgctcctcctcccagcggcgaccgacaacctgcacggcagtggggaggccagccatcttggccgagtcgtagtgtttccatgcaccccgcgcgatgccgttgtcacagcccagacgctgaaggacggttttgtaaggtgcgtcgagggcgtcgcggatagggtctacgtggccgacagggataacaccggaggagtagtcgagcaagttccacaggaaggtgtaaccgcacgaggagacggcatcgtgcatggccttatgcgggagagccggggtagcgttgacagggcacagaatgaaatcgaattgttggggctcggcgtcccaccacttgtgccaggcggcgcggaacgcttcgcgctgggcggtcagggtccagacctgggcggaggacttggggccgaagtcgcggatgagagtggcggtgaccttatcgcggcgaatgtagcgcacgtagaggtagaagagatagcggagtggacgggggaggttagcgacgcgggtaagttggatggcgcctgggtcggagggttcgaagctcttgaggttgacgttgaagtgatggcagccatctgagttgagaagttgcgaggcgagatttagacccgtgaaggggtctgctgtgggtggggtggtgatttctgagactgtgtgaccggcttctgtgagcgcggctaccgttgttgtgatggcgcgcttaatagccggggttggggggacaacacctagagatttgtaagtgggctgactttgactatcagggtgagtgtcggtacataccatcggaggtcatcacaccaatgcgaagaggtttattttgagcctcagactcgacctcgctgcgccaggcaatggggtgcacagtatgctcatatttccagggctccatacggataatcgcacgagtgaagtatgtcaaatcatccaacgtacgggccataggactaaagacactaggaatgccctcctggccgggcatgctggtgttcacgccgcccttgggccagcggccagtgctgcagcggagcgaataaataccactccaggcggcgggaacgcgcaccgatccagcaacatcggatccaataccaatgcggccaccctgcgccagcaacgctgcctctccaccggttgacccaccgggcgagtatgctggaacatgtggattgcggcattgaccccaaagcccgttatctgactcgaaagagagcagggtgattggcagagcagtcttaacgtatgggacagcgcctatgaaagtcagtatgtaatccagctcccaacgaacgtgtcttaagagccataagcttaccggcgtcctttaagagcttcaccataggcccatcttccaagataggctttccagccatagcagcatatccaacagttgcatcaaatcccttaacgtgaacggaatccttcaacgagaccggaataccagccaacggacccttcaggttgatttctgactgcagccatgactcggcctcgggcagcatcagctcggtgacgcagttggttcgctcatgagcccttttggctacctttccataggtgcggaggacatcgagtgcggagacattcgagtcgtggacatcgtgaacaagctgcgcgataggctggtcgatagtcttccggtcctggtcggaaatggggagttgatactgttgcggaagacctgcaaagcggagttctcgttcgctttgtttatggttcctgtagatattagccccggatcatgtaagctcgagaggagaaaggcaagcttaccgtatgcgacggtaggcgaaatagtcaaatggaggaagcataatgtcggtgtgatacaaagaggagaaggagggggaagatggggggggttttatacgatgcggagaagtggagaagtggagaatgcgatatgacccggctagacgggtagcaccgaggttagccgtggacaccaaccctcagggctgttttgattgtacagttatatctagctatgtcgtacggaaatgggcaatatgtatgtagacttactttatacttgggtgaggtctgctttgatctcgaaaccctcaaaatatcggacaaatcaccgaccaccagatgccagcggcaatttctccgcagaaaagataaggagccactgcccagacacgctatgcctattgtggtaagtgcatgcgcctcatagattagatgccatagatagacgagataacttgatgagatagaggattaagattgtctatggtatgcagttctatataaaagctatctaagcaaaatgcccaacgccgtatggggggcgggtatatctccaatgccatgcaaactccagttcaacgccaaatttcaaatcaaatcaaaaacgcttcactagccaaagccggttattgagcagtatccggatgaggctggagccagttgttcttagcaagccaccataggaccacgctgacaacgatgacgagcacgacggcgaaaaaaatgatgaagccgcaaatgatcgaacgcttgctcttcattctttcgcgggtaagccatgatgccctacagggggtgagttgaggttcaacaaatgtattggagatgagggtatcttacgcatcctgttttgcttgtgcccggtcaattgcttttgactcttcgtccatgtggactgcagttgagaaccgtttccagaaatatgggtctcgaacaagagccataatgatatgctatcgaaccgaggtggatgtgttggtggatgcgttggttgttgcgtggtgtcgactggatgactgaagggatagtcgccggaccggctgagaagaaaacaaccactgatgtatgaggatgcaattgtaaatcgagtggtgaaagtggtgtgggtatgtcccatcaatgaggatgtcaatgtattcgatcgaagcagtgagttgaagatgggacgcacactgattcaacgagtagagtagaaaaaaaaaactttaacaacacgggctacggatattagttgcgcctatcctctagatagaggccttagcgatgaaatgccgcgtgtggaattctaaccacagacacatgtacatactcacccgagggctggaataccaatcaaaccacgatcgactgcctatccaattgctgatttgtgtaaaaattcccaagctcaggccacggaaaggaaaatcaaggcagacagatatttcgaggtgagaatggagttctggtattggttcttaataataatggttgtgactgaatgtttgttcggcgatggcatgccgatcgcggaatgagagattcctcggtggtggaattgttgatcgctgacattcaagcgataacattggtcgatgataatttaggaatgtgggcctgtattttctaacagggattgatttgataggaaaggacattatggtagaggctgaagaacgggtcgtatgtatttgatatcgctctccgaagctgtttcgcgtgggtaactgatctatagaccatgttgcaaaaatctcgactgggtcatcaaccggtatggatgacctaccccaagcctttctatgtactcgatgtagtgacgttgccaataaacaaacagaaattaggttgtagcgtcgatggttaggtatgtaggcagtgaaacgcaagcctcaatcgatgcagtgaagatcgtgctgccccttccttttgaaacttccagtctgttttgattccgttattgagtgttgataccacgtagtcagaccataaaacttgtcatgaaccccatccagaaatatcagtcagatctggatagtcttgccatgcgtcagcctatagaaagtcatcgcgcgcaactgaaatccggcgactaggtggcaactagcccaaataagcaggggtcaagcctaagaacgatgtgcaaataagttgacgcgtccgtattcgttgactggaggctttgaaagtaaacatccgatggttaagcgcagcagggagcgcagcatccctatgaaccgagacgtttctgttcgtagttgataaccatcattctttcttgggacaaggatgtggagagagtaagatgagaacaaaagaattggttgaagtgttcgatccgatagccctccagctccagggctccagttttgggtgggaatagcttcaattcaatggtttatgcggccgggacggttttcaacgctagggattcgaagaaagggatggtttgtagggtaggaatagcttcaatttagcggcgtcgaaagcggtaatgtaattcacaagcgagtgacgcacacaagcgagtgacgcacatcctagcttagagggagggttagtatttaaagataaatattaagctttataaggatctaattaggtaaaaaaggtactaaactagctactaagaagctatttttaattatctctaatttaaaagctttaatttatataaagggatatactttaaagaagttaagtttattaatatagttaatcctattctatatttttattttaattaactaactatataactactttaagactataaaacagccgatattaagtagttataaaaggtaagaggaatatagtagtatataaattagtataatattattttacttataaattttattaaactttagtattaaatagcttttatagctattaaatactaaaagtcgataccttccctttatatataaagaagttaaaggaataaagagcttttaaagctagtaaagcctaattttattagaaatctaactatttagactaactttaaaatactaattatttagaagcttattaaactaagatttaataaagactttacccttaaagattatatatagagggagtatctacctagaagtatttatatatttaattatagttacctacttataatttctggggggggggagccctgagttttatatagcccgcacgttagtaaagccctagttcttagctgtaaaggtagcgaaggccttcttcgctgagcgcgggggggtgcttcagctacttccaccggcgtagtaatcaattaagaagcttcctaaacggagaggccttcttcagaaggtatctacctctgggatctagtatgcttttacttctgcttctcgttggcagcctgtaaatcgcttacttctttcttaagaagtgcggtagattgtatagtaatctagcaggcttttaaaacctggttaatagctgaattaagcgggctcggagggcttcttaatcttatataaagcaatgctttaattgataaagcttacttttataattaaacgtagtttaacggtgtttttaggtcctaatcgctatcccagcttagggggggagttagtgtttaaagacaaatatttagctttaaaaggacccaattaggtaaaaacggtactaaaccggctgctaagaagctatttttgattatctctagtttaaaagctttatttcgtataagggggtatacttcgaggaagttaagtttattaatatagttgatcccaacctatatttttaatttaactagccgactatatacctactttaataccgtaaaacagccgatattaagtagttataaaaggtaagaggaatacagtagtatataaattagtataatattgttttacttataaattttattaaactttagtattaaatagcttctgtggctatcgagtattaaaagccgatatactccctttgtataagaagaagtagttggaataaagagcttttatagctaatgaaggcctattttatctaatatctacctatttagactaactttaaagcgctagtcgctaggaaggtctttaaactatgatttaaagaagaccttacctttgaaaataatatatagagggagggcctaccccgctatatttatatatttaattacagttacctactcgcgatttctaggttataaaagtaatctctaactatagtatttacttctagttataacctttactattatagttaatcctatagtaaaacccgtcttattaaagttataaatattatctagatcgattctatactaaagaatggttttttaaactagattaaaccactctctaataatccttaagtctttatatttcgcatactcgtaattataatatcttaagaattaggaggaaagggtagggtactgtttaataaagtttgtaacccaattttcgccaactaaaaggaccggggttattccacagtattcgaggagaatattcgccatttctcgtaccgaagagggccacggggctgaactgcgagaatccatagagagaatctatttctgaagagattcctcttcaatttctgttaatttatgcgagttggcgcgagaagtcgcgcggtttgtaataccgcggagacggcgacgtaacgtagtttcaggcacgtcgaaccggcgtgctgcctcacgaatagaactgatttcttgactcttaatagcctggatagctaacaagatcctgccttcttgctctattgaattttgagagcttcgagagcgaattggtggcatggtgggtggttgaattaactaagtgctaaaccatagacgcgttttaggtggggtgcgtcactcgcttgtgaattacgttatgtgattcaggcatattcaggcacaatcaggcatccatggatttagagcttgattatgtcatccgatagtcagcatgcatcgagaaagtctctcgtttccctgtcgctctgcacttggggtttagattaaaaagtgagaccaaatgcttcatattatagacgaaactacgaactctttgaatgaaaaccgaaagtagaaccgaaagcgatcgccacgacttgttcagctatgctctgcaaagctagatctagcacggagatttgcaccggaaaagtagagaataaacatgccaatctggggtataagttaacacatggaatgtaccaaattgtcgcataggagacttacaatccctaagatactcaatccagctaacagagtcacccccttctcaattccaaggtcaatgaacatgaatcgagagaagaggatgaacgcaaacgcaacaccagatcgtgagatatcatttccggcaaacagagaagctgcatacttcgggtacgcaagcggcaggtatacagatacacattgcaatataatgaagatagatcctgcatataggacaataccgaaggcgctcacagcccaatggatagttccgttggtagtccaggctaaacggcatgaaaattagtctctgggttcatattaaaccgccgccttgaacggggtgcttctgcttaccgaaaataaaaagtccggccggtggcccgaaagaagcgaatagagcaggggccaggcgatgctcgtgtgcacgttggccgttggcttttagatctggcatgagacgggtatgaagataaacaatatagacaacaattgcaagcccacagccgataataatcgagataaagattagcgcaacatccgtagcatcaaacccatatttggccggataaaccaacggaaacgcttcaaagaaggagtaatagattccataaatgagggatgtatagaaattggcgaatagcacggctgggtctttgaccattatctcgacgggttttatcaggcaatcaaggagcatgtcgcaaaatgattggctgttctgcacaatctcagaccgcgagaaaaggttcgagttcccagtaactttgcgtagtcgccgtgcgcgacggaggaggatattatcggtcgatgtctctggaagacagacggtcataagaacaaggatgggtgcactcagccaaagaatttcccacatcgcccaccgccaactgactaatagttagccactggtatgatgcatgcaatatcgattgactcacccttttttagcgattgaaaagaccgacaaaaccggaccaagagctggtccaccgtacgcagcagcaacccagctggtcaatcctagcggtaggtagatatccgaatactatagtccgatagattgtcagttctagcagaggaatacaccctcttacactaaaaggcattgttgcacgaaccatatctgtcatcgaggcaccaccacttgccagacaagggcttccgaaaaagccctggagaagtcgaagaaccataagtccggtgtagttgtccaccaaagcggtaggaacacacagcatgacaaagatgattaaggaggtaatatatgggatattgcgaccatacaatggaacctcacttaagggcgagaagagcaacggaccaaggccatctgtaggaaccgaagcgttagggcttatcctgcgagagatatggtaggaacatacagcctaatacatataatgccaaacccaatgaagccttcgtttgactgacttggaagtgttccattatctggctgttgggtaattagtcgccatgaaagttttgttgttggattgagagcttacggttcagctggaacgtagattgaggagccagaatagatggcgaacgtgtacaaactgtcaaggcttagaaaaactgttgtgtgagcatagaggtaaaatgcgaggtggtctgtaccatatctgaaaggtaacaaatctcttcttccataacgaccaatttctcgggtttgctggatcgtctggtccgtaccaatcgactatattctttgtctcatctcgcgtgtgtgctccatccgaatttacatccggggggaagtctgaagtcagtgctggggttataatagagttgccgtcgagactttgtttggactcaatctggtattttgtctctgccgacttcgatggaacaaatcccggcttttcttccggataaagtagaatcctattaccggtgatttctcgtaaaagctgtcccagaggtgactcgcgcactgtatccatatcttgcccagagttgataatatatagaatagcgagatggatcaaggaagatggttagctattaaataaaatgagataatgatcgtcctagtgcatatcaatcacatcaaatggtgagtaggtagggtttacaatgttgtacgacgcatgcaagccaccgtcgtcgaggcacatccgggaaattagagtaaacaacccccttgcatcgtctacaaggctcacaaacccacaagtctgcagtgttcggcactgttagaacttatacaatagggactctggattttatgaatagtcttctgaatattgcgagtgatttgatcttatatggaaatacaatctcagtgtgatgaaatcgaatctaaaatacgatgatctttccagatcaaccaataatgtacttcgtgtaacacaccacacctaccacacctcatgcgtgcatacataactatgatgttgaatatttatacaagccaagcaccacctttctcctaatcagctagctcatcgtatgagacgatcccaattgggtcactagcacattgcactataacagccactagatatggactgttttactgtaatgctgtaatgctctgttgtaattcctcctagtattcaggactttcctaccgggaagccgtctaaatcatgacttagttcatcctcctcccagtaactattactatcaaatcgtagagacagccccatggccctagactattcatgtcggatatttcacgcgctaatagccaatatatgcccctaaagcatggcgtacgtgaatctgcatacttggagaaaataattgcaaagaaaactcgaattttgctccaatttgttagctttgttacgttgttaaaacgtttgctcgccccaaaatcaaagcttagcgtgttgtacgcttaaactaccggtggtaaataaaaatcatttcctttcagcaggagaatctcgttgaaaaccccaataagacatctctgagtcgtgccaagtcctttggtctctgccttctcctgggccttcctcaataatcaagtgtaggtgtaggtttggggaccactgatgccgcccggggttgtgaccgtcacgggcacggcgccaagcgcgacgtgcgcaggcgcaacagcagtgatagtgccgtcatcttcaacggtgaatagggctccagaggtatcgaatgtcactgcggtagcctgagtgaatccggacccggttagggttacgttattacccccaaggcgagatcccgtggtaggactcagcgctgccagagtcggagcgcccaaataagtgaaaggcacggcatcgctaaaagcagcatcagtcacgacagtcacaggagccagtccggccggtccaggaggggaggtcgctgtcagctggttgtccgaaatgattgcttgggccgtagcaggtgtggccccaaacagaacctcatttgtattcgacagacctgcgccgctgatggaaactgcagttcctcctgcagtggaaccaaaggctggggtgatcgtagatataatcggcggagcctcgaaggtgaaggtcagtgagctgttggtccctccagtagaagtcaccgtaattggtactgtcccaattgcatgcgaaggtgtagtcacatccacttcagagtcggatacaacatttattgcggtaccagggatggttccgaatagcacactcgtagttcccgtcagaccacttcctgtgatcgcaacctgtgtacctccacttatgagatctgccgacggctccacagctgtgggtgcggggccagcaatgtaagtatactggtctcccgggttgattggactagatccattaggtgttgtaacaaccacatcaaccgtaccggcgacagtcgacgcggggactgtcgcattgagggcagtgcttgacaagacaacgaagaagggcgctgtaacaccaccaaatgtgactgatattgtgccagtcaaattcgttccggtcaccgtgacgacattaccgccgctcaatggtccgctgactggggacaaactcgtgacagtcggggttggagtaggattccaagtccaaacattgccagtatcagccgcactcgttccgcccgggttagtgacgaaaacattagttgtaccagttccaggcggagaaacagcattgatcaaagtgcccgaaacaatcgtgtacgatagagccgaagttgtgccgaaagtcacggccgtggcgtttacaaacccagttcctgtcaccgcaaccaacgttccgcctgtcgcagggccgttattgggattcagagatgtgacggtgggtgctgatatcgtagtgtatgtataacccccggtcagagtgctggtattgccagctgcatcactgaccgtgacgtctacagctcccggtgtcacggttgaggggacgaccgctgctaccgtgttgttggaaagtgctaccacgctagtcgcagccgtgccgccgaatgtcacagagttaacaaatcctaagtttgttcctgtcaatgtgaccgtgttccctccagaaatcgacccactggttggtgacagtgaggtgagactcggcaaaggagcaaccacatatgtaccggataatgcctgacactcaagacctttccctttccgttttagtgctcacttcttgccgctttttgatcactgagtaaaaatgagcacgtccctgagtaccctgacttgatcacgggcaattatataattaacgtaatctgctcactgagtatcacctgatcatcccctgagcaccctgatccacttactgatcattatctgagtatcctgatttgctcactgagtgctcactgaatgtacggctgagcggcctgagtaagctatatcactaaaatgcgatacgctaatcctatcacgtgtaaccctttccatttagatcgcctatcaaaaaaggactggcgcagtcaacgtgaccgttcatcctagcggtctcgaccctatccaagtgaaaacctcgcagtggggctattcaattgacccatcattttcccattccagcctatgctcctgggaataccctcggaatacttcgcttaccagcccggcgatcccctaatcgggctttggactactaccagggcgagggcgattggacggatttccttgattagagcccttccctgtatcaagacaactagagtaatcagtgtttagcaggtacgacgatgaactacttctctcgctaatgagcgtgtaagtcgaaggcgtttctgagcgtataatgtcatgtcttttgcgctatttctaagtaggttgtaaaccgaagacaaactatcaacagtaatacctagatgagctcctgcgggctcccaggagctcatcggtattattagggctctaaatgtctatagctatttcgttctaatcctaggaattctaagcctcgcccgtttggcctagcatttctgcctaaagtgatgccattttaaaggggaatatatatgcctagtcacttactccgaaaacaatagttttcatcattcctctgcatccgagttacttaaccaaaaaaaaaaagactgtttttgaatatatcacagtgagttcagcctttatacacacacacacacacaatttattaacgcccggcggctaagccgtaagggcaactatctctgatctactatatatagctctgcaattatatcacggacgtgatcttccacggcgattcgctcgtagttctcgagaccttgttcactgctaattggacggagaccgaaccgtctggcatcctcctcaagcgctatcaagggggtaaacaatcgtgcttgagcttcctcggttggctgcaggtagttgcacacagagctgtatattttctgctgtcgagctgaacaatcggtctataatgatagtcgtgtgggacagtattttccggtgggcggaggtatgctccctgtagttgagcgagacgatgtttcgactctcagcggtcgggaaagtaagctgtggcagaagcgcaggagttctgcaaatgcgttcgtcgattgcgctccctttgctgcttctctcgctcttgggcttgcttctctcgctcttgggcttgcttctctcgctcttcggcctgcaaaaagagtttcttgtaatcggtggggctggtattggccattgggttatcgaaagaaagagaggaattagggataccggtactcgagctagctggcttatcagctgatccggatttcggcgaaagtattgtccgaacgccgttgctgtgagttggttagacgttcagtacaatgggctgaaatttgggacaggcaagggacaatagttccgggcctatggcatgcaacccagaaccgaggttctgtagtatgtctgcgtcaaccacgacccggggacgcagtgctaaaactgtcgcacttggacctgattgtcgatcaaatattgtctctttttggccatctggcgtaactgtacaacctgaggaccgatagtgcatcacaatgctatcaaaaatactaaaggtatcatggatctctttgcaagttcttggaaagacatggcgtgatcccgtgtctgtcaaggatacacatgaagcatacaagatggacggagatgatctgcgcgggacccacatagtgtatatgggttccccggaacgcgaggaagctaccttcttttgcttcctcgcgctacgtcaaaagaaagtagcttccccgcgctacgtcttgtatctagagtcaactatagttgttctcaatattgattgttcatccagagacgctatctatctctatgtatacgtgggaccctcacatctcgcgaaatgaaatgcgggcaataagtgcgggcaagagaagaagaaacgattaacagccaccacgtagtcgagtcagtctgtgataatgagagcgccctttcccgtcccaaccatctttgcgaatcgcacctcggttgactcttgcttcttcaagcccacatccagctgcattgcccaaccacgtcagatgcgcaagtggcctcacagagtttgaaaggcaaaaccctcttcggctcaccatcgatgatgtgcgtctctaggagatttgtgaaatggctcatcacaccacaatagagataactccaatcagtagcggctctgtctctgctcgccttggccttgaacacaacacgctgtacaccaacgtcaatacgagagtttcgtccggcctccaagatgctcccatcaggcatgataggaaactcaataaatccagtatagtcacctccggcattcatgcattcatcagagaagtcaatgttgtcgctattgctgtaaatgtggggatatgcggcctttgcggcagtctgccagtccggttgaccagagcgcgggacgcccctcgcattggagaggaagtatttaattccctgcttcatcgcaccgagaatgtcggcgctgctagcgtactcaaaaccaagtcgggtgtcgcagccgatccattccggtatcttagctgcattggaaggctcgcccgggtctccttgaaagtccggtgcgcatgatgggggaattgcacgctttcgggtaatgggatgagtgctagagcccatatttgggttaatctcgcatatatcttcattggcttcaatgctcgctgcttcgctgaagatgtcgacatcgtctgttattggtcagtatgaacgtggatgaaacatgagaacagattgtcaggtatggcaagtctcataccttgtgctcttccaagtgatacttgcaattcgatttcagcgtagggctcctcaatgccttgaatcatcgagtcaacccggacgttgaaatcgtcctgccaggtggtaaaccatgaagtgaccgcttggaagttttcgggatccgcagcattgatcttatccttcaaatcactgatttgagtggacatggactgcttgagggaagttgctgaggcatgaaccgtagaatacagatccgcgggtaccgtttgcgaggcagtcaaaagtgacaaagcggactcgaaacacggcgtcccttgggccataatggcggacattccgctcgtgactgccgcggcatcttcgacaaggatgggcgtcggattccactcgccattagcgaggccgtccggcccgtcgtagtccatggggagatttgcctgctggccatcggcgctcccaccactgctgctgcttccactatcgctccctccgccgccaccacctccactgctgccggtgctatcggagtcaagatgatgttggtcagtagagcaagcgacgccacaggactggtcacagctttgaatgctgcaccctcctccacagccatagagaccacaatcatctaccgggtcgctcgagtcgcatccaccaaaaagtttgcagctatcggtaccacagccgctagtacaggtctcagttagagtgccactcgaccaggtaacagaagggacatttacgcccaatgaaatcgacttcgtggcctggggctggtaagtaacagtgtaaggggcccctgggaagacgggtgccggcgttgcgctgcccgatagaactggggagaagggagcttcgtcgcccgaaagcacaagctccgacgactccggcatgaagctttgaaggggataaaatccagtaggggaggtatcggcaccgatgacaacgggccaaaagggaaccttatcggtgaccagtgataggacgttgagaatagtagtctttatgccggtcgaggtgcctgaccttatccatacagaactgaccatagaagggaactgaatagtcgtcgtcgagcccagtaggaacgggggtaaaatgatcttgcatggtgggatgcattgaacctcgggatccgtattatcccagatgcccggaggaacatagacctcgccggagctcttactgccggcctcaacacaggcgccttccggacaatacccatggctatacgcaaaattgcaaagaccatagtcctccagcccatcgataggagtggctccggtgcctgtagtaggcggcgctggtaccaagccaccctaggcagtgcaggtgtaaacatgcattaggcagaagccatagttgcacgcaaagctacagaggccggtaagagtacccgatccagtgcctgcaatatatacaggaggtacgaagtctgagacggtagggataaccagagggacttgctcggtcccacaagcggagctcggacaatatcccaagttgcaattgaatgcacagaggcctgaataacttgtatccttaccggcgatagggtatccaacaacgcctatagagttaggagctttcactggcttacctatttaccggcacgtatatactgtcactgggtagtagctataggagcaagcgaagtcacagagaccagcgaagttatatacaccggtcccgttaatacaggcctactccgagatcgacaacagcggctttacggaaacagcggcaggggatattacactcccaacccaagcgttaaagagcccatctgtacaagcggacgagatggctttaccggttacttaggcaagctaagttccatcgcgggagatagtcacaataacctctcctattcctataaaaggaacactgccatgataaattccaatttttccatccggagcccagatcctggtgcacaatgtcagtcatatcttttggaatgtttaaaattgaattgagatgatctttaccataagccttcctacacgacgcctccgatactgactatcaccgttgcaggctcgaccagaagagcagagtagaacacacagtcttgcacaatctgactaggggcaaattccatctacagttggttggcagtattccctgtggtaccactatcgcaggctgtaccaggggagagacaataccaggtaacgacgttttcttcggtcaccgttaccgttccttctatatacaagtcgatcaaaaatggcaaattcaatcgccaaccatcatacggcatatccttggcaaagttactaggagccttcccaatcgtgaaggcctccatggcatagtcgtagaggggtccaatatagtgagactcaccatagtcattccctggtaatttttagataaggccaaggttgtactccaaggtttcttgaacttacaagaaataatttccacgaattcaggctgattatagagaacctcgacccagcgatcgtaccatagatcatcgcccctccaaagccagttcttgtcataaccaggcagattagtaaagaaccagggcgaaacagccatcatatatagctttgatccagactcgtttagatactgataataagaggcatcggtataggtatccatatcttatgggccccacggccaacctgcccaactaaagagagcatctaccacgccaccacccaattgcgaagctggcttagcaccaatggaagaccaatcagggacgaaaaagacattgtactgttgcttcagatcgatccagtcctctgcatgcgcagggccctcgaatgtagacacaatatattgccctttgtacaggtaatacgcagtcgatgccgtgtattgctctaggagcgcggccacgtcacctgctttccacggaccgttcccggcgtagtcaaaggaaaagaacagtaagaatttcaaatcggaagcaacttcaaaagcagttggcagaatttgaccaattctagagtcgacagccatattcagtgcaaacgcatcaaggtgagcatctttggctgcttggatgtctgtttgccagtcggtcaccgtgtagttttccgcgttcatcagctgtgattcatgtcagcttcttgccattacgtatagtaggaggagataggggctgtgatataccatgaagtgcgcgaaaacggctgcagcttggacttgacagtgccctaggagggccactgccagcaaagaagatagtctcatactgcgatacctctgcagagaggaacaattgttcgactatatcagaaagacagcccactgtcggttggacgggggagcaatgggtttttatacataattcggtcgcattttcctagtcaactccgtgctaacttccgtcttatccgcggatactgcttattacgagaaacaaacatgaaaatctgcctatttaagtaccaatttccggtattcctcattgtttaggatggtaccgaatgaaatacaggtccagtggtagactagattgttagtgcctggtagtgccatggaattatctagatgaaatggaaggccagatgaaaaatattgtactttgccacacatcaattaagctaatcgctaccctagtctcaggtgtatttctctcaaagtaatgataagatgccagggaattttatccttaaaccattagttaaaaggccatcttaataaacaggtagtatggcaaattctcattttcgaatgctgttgagaagtcataagtacaggctatgtgcaatagcacgccacatagaaaatttcgccaaaattcccctcttggatagcctaggtagcgttgcggagattggcatacttagcttcgcctcgggaggccgtgagactctagccggtggcgttggagctccaaccgagccctcgagcctcgaaacccttcaggcttagtctgtcacgtgcctatatatttgaaaacaacaaatgtagcattgagcatcggtatgtatcttgctgattagggcatagacacggagtttcattaataagataatcaagtatcttgtttgggttatcgctttttggtgaccactactgtgttagtgtccctcatttcctcaattctcgctctactctcgactagtgtaagtagaggaatactggaccactaattcagtagttcagggcaaatggttcacttccatatacagtttagtctcggagtcctcttcccgactttctttagtgtcgcccgaagtggagttctataaattactatggattagagctaggctacgctggtcagtatactccgatcgaggtaggatggttttctaattcataaatcatacccatgcatatggagaatgtcgcgagtgcgcattggccgataatgccctttttacatattccttttttttttctcgctgatagcacttaagatctctggggcaaatgtcccaccttggagaacacagcatttctccaaaagaggttttgaccatttcagggcccgcgctctcctgaaaccgcgtgtagattgtaagatttctatcagaacgcgctagccaggcgcacctgcagtacagtgagtctcgaaactgtggtgcatcctgtgaatataggtcgaacagcggtgtttggccctcgtatattcagtatagatagagagctttcctgaaaacccaccattcccgtcgcttcatatacaataggcgttggctgaaatatcctgtgtcaagtatttgtgatgggggccagcttggcaggtgtccggattaaccgtgtgtccggttaaaagttagacttgtacggtgaacttggatccactttcagaattggtcactagcgtgaaccatttaaaaaggccgaatgatacagtccctgactccttcatctgcaacacctgttcaaaaactggcgtccaacgttgccatccatgagagacgactacactgagtgggaacgcttctcccatccggacccggacgaggaagaccctccgactctggacgaagttcaaaccctgcgagaatttgccgagaccttcggcacagccaatgccattgcagcagaggatgctgctcgccaactaatgtcgctcgtcgacgagggccgcgtggtcgaggagcgccagaacaacgtcgtggacaaaggcgaacgtgtctcctggttattatgggatgctgctatcgacatgacgcgctaccagcctgctattctcaagttaattgaggcgatccgcgcgctgcctcagctggaacgaaccgaggagcagatccgcaccggctgtttcgaggaccgactagaaacctggaggtccttggaggcattcgattacatttggtcggagacatactcccgtgagtggccctttttttttcttctcccgcccctaacagaccaacgctgtgcagtccggtttctttgctcccgtggcataacggcttgaaatttcggagatatccgcctgcacatcctcctgcccttcatagagttcctcctaggcagctgatctcatgtcacgaagtgtgggccctatactaatccttttcatccaaggctgttgggagatgagatacggcccatatccctattacgggtggactgaattccacagcgccaacgctttttatgcgcactttcttgccgcttatcctcccgaatctcccgatctcagggagttaaccgtggcattgcgactgatcgtattcgccctcgagcaggatccgtggacccatgcccaacaacctccgccgcagtggcaaggccaccgctatcgggacactggtcgccctactgattatatgcaaatgctgaatgtgagtgggaatgaaaggccatgatggcatttgtgatgattgacttgcatattttaggctgatgtgcacgctatggttccattttttgagattgccgggcacattatcttcgggtttgtggggaaaagagacctttctctcctcgaaaaattaaaaaagagggattccaatctatggcacggagactcattgttctcattggaaagatgggaattttggaaaacgcggttgcgatggataagtgagcaagatgagctgatggaaagaacgcgagcggacgcccgaaagattgtgcaactcatgcaaggaatcgagcaacagaatcgagagatacgcttggggagtcaagattagcataaagataccagaaataaggacttccttcgtcgtctattctgatcagctcatcggcccacttcatctgaataattagttaacgtaattcactagtgagttggccacacccccgagttggccaccccacctaacctgtcaattttaaaggccattgattcgtcccaaccgtttattattacccgatcagcgttagccagaggatccgagctagcatcaaaattagccatagccatgcgtgccgaggtttccgcgctaggcaggggttgaattccaaatccattagcgcaatcaatagtataacccccgtatctcttgttcacagcccttaagactggaaggcgtgatggatgaagtcagtatatcagtggtagatccagaagatcatgtcacatggactgtgcgctatgcatgccatgggacgtaagaagctcacgtcccgtcccgacaagggccggggtgcgccctcgagcaggatccgtggacccatgcccaacaacctccgccgcagtggcaaggccaccgctatcgggacactggtcgccctactgattatatgcaaatgctgaatgtgagtgggaatgaaaggccatgatggcatttgtgatgattgacttgcatattttaggctgatgtgcacgctatggttccattttttgagattgccgggcacattatcttcgggtttgtggggaaaagagacctttctctcctcgaaaaattaaaaaagagggattccaatctatggcacggagactcattgttctcattggaaagatgggaattttggaaaacgcggttgcgatggataagtgagcaagatgagctgatggaaagaacgcgagcggacgcccgaaagattgtgcaactcatgcaaggaatcgagcaacagaatcgagagatacgcttggggagtcaagattagcataaagataccagaaataaggacttccttcgtcgtctattctgatcagctcatcggcccacttcatctgaataattagttaacgtaattcactagtgagttggccacacccccgagttggccaccccacctaacctgtcaattttaaaggccattgattcgtcccaaccgtttattattacccgatcagcgttagccagaggatccgagctagcatcaaaattagccatagccatgcgtgccgaggtttccgcgctaggcaggggttggattccaaatccattagcgcaatcaatagtataacccccgtttctcttgctcacagcccttaaggctggaaggcgtgattgttgaagtcagtatatcagtggtagatccaggagatcatgtcgcatggactgtgcgctatgcatgccatgggacgtaagaagctcacgttccgtgccgacaggggccgggctgcggcccggtttcgatcgctttgttcttggcgcagtgaggaactagtccaaatgtggttaggaaaaagtggtttaaaaaaaggataataaaaagaataatacctaacccaggaagtatcgacgtgccaatatgcatcaacccaatcttgcaagtgtcctttacttccccagtgccattctaatctgacttcttatgtggaggataatccacgaacagcaccctgggaactgaaggctacctggcctgatgaaaacagcggtgttcaatccagtctgaaccacggtcgcatgcagatcacccggcttatacgcaattggaaaagatacgtttagagtgcaaaaagcgttgcgatttgcccggggaaagctcaatgtgctccaccatactgcggatcgggccctggtttggtttccggagggttcccctgaatccgatggccaaaattgcgtcaattgttctatatcgggcagggacatactgagacggagtacattctgaaaatcctatttccttcaatcaactgagcaatttcaaattaccatattcatattattatcgcataacaggcggctatagtctcacctagtagcatccctcaatcgagataacctccacacaagctctccaacgtcccgccattggcttcaaaaggacgatttgcggatcttccaggtcggcgcaaagtgctgatcaatgaccggctctgatcggctcataaatctgcccaagcacaatggcagtagttcagcgagatcgtgacacttggactacgcgatgcctaatgccccgtgagccagacactagactcaacctagcttaagtcgaaaagcctaggccatcggggttacgagggttcccctgaatccggcggccaagattgcgtcaattgttctatgtcgggcagggacatactgagacgacggagtacattctggaaatcccattttcttcaatcaactgagcaatttcaaattaccatattcatatcattatcgcataacaggcggctatagtctcacctagtagcatccctcaatcgagatgactccacacaagctctccaacatcccgccattggcctcaaaaggaggatttgcggatcttccaggccggcacaaagtcctgtccaatgaccggctctgatcggctcataaatctgcccaagcgcaatggcggtagttcagcgagatcgtgacacatggactacgcgccatgcctaatgctccgtgagccagacactagactcaacctagcttaagtcgaaaagccaggcgatcgggattacgtatgcacaacctgataaagtgtcagaataatcacatagtcgccgttttgcgaacttgtcgatacttcaaacgaagcactagtcaaaaataagtactataaacgagtgtattatggatgagggggaatttgattttcagcctaccgtcggactagcgtccaacaatgtcggctaatggcaggcatctctacagcttgaaacacaagacacgaaaccgatcttccgcgctaatacatcctaattcggagggccaccataatctccgccaaagggccgttggccggatgagattaaatagagaattgtataagcttgatctgcgcgacctaagggaagagagtatgaccgtgcaatctccggtctggtatatcgaatactagactatacctatctaggtggcgttatatatactatataggtcacagactacatagatgatgatatttgctgattcatgccctctagctagataaacaaccccgtaatacctccataatagtacacttcctctataaaccaactcaacttctagtatcttcaaaactagggtatatattggctagctgtcaggagcggttggtggttggcttgtgttagcgcttgttgattggtcaacggaagtgaatagctttaaagtgagttagtactaagcgaacccatctggccgttatacaccggctaggaaggttgtagtatatcagaagcagggaagccagtaaatgtaagcttatttttctctgcggttttctctacctctatcttcttctccagctagctctacatatattaaaaattaccgctgacctccagtagtatgggtaacagattattactagctgtattaccaacctatatagcgttgagttattattattttagactagatatttggaacttaagtatttaaatcctagccagattctggtcattagtatcactcagctagcaaatctttgccatagcttaggtttttcctacctctagtcactgtactaattataggagctcatcccgctctctattagcgtccttaaaaccctataagtatcgtcgataaataacactctagtacttttgtttagaggtctttactactagtaaagggctttagattctacactcgggtaagtccttactttaacgagatcagtaattaccggacgtaccaatagtatatagagggatataccttaggtacctggcagagggccactataaccagtagtaggacagtattgagtccgtttcagagcagtatctgactcggaactgccataaccagtatcagctagggcttcggatatcgtcctacaggaaggtatatcgagcgttagcacaccgaaaggggtgtctttataagatagagtaagtttagcattaaccgttcaggtagacaatgttagctcttataggtctccggcgtatacgctagtagctagaacgttttagagttagtcccctgccgcttaatctacaccgtaggattataaggttagcagatcggatacctagtcattagtctataacataataaccggctcgcaataatagttatcctgtaatttctacactatggttacattaagggtcggtagtcagccgttaaccattacttaaccagtaggtttctcaataataaacttactttattatctataattctacagttaggttttaaacattatcacgacagcgtactctttctattagtaggtagcacttattcacatatccaataaacattatcgttagaatcagatcccagtctcatttaaactacctaagctttactagaccatgcaatttcgctaagtacccaaccaccgctatctgtatatattagtaatctacctagtcttttcggttactctagacggtatactttagcccagacttcctgccgctaagtactcgaaaagctctattagacagcgcgtatcgcgctaagtaggaactggtagtggttaatttccggtttactcactcctcccgatatatcaagcagtctatcaataatcgccaatctatagtagggtatacgccataagatatttgcggcaacagtagtggatcatacgccgatctacgttcgtaaaaaggtaggttttaggtaatctgtgaataaagagtctgattcattggacctcataagctactctatatttgaaccagtcgcgactcaatagtgccgccacttaaccagatatcgagaatatattatgggttaatatagatttatccctgttatataatttccgtgttcctattattagaaattatataccggggtacgcgatttggctcagtctcaaccgtatggcatgcgttaagtctgtcacatgcaatactggccctgtcggccttcccttacgggtttagcatttatcgttctttccgttatcgcaaaggccaggttcccttagtctttaagctggctgtgtttactcgccgtcagctaagggtatgctatcagtttggcgtacatagcggtttctctgtgaaaatgtgaaaacgttttacgagtcttgggttaacagtatatactactccaatcttctttaccatttccgtcctagctggtaaataggcatattagggttagagagcacgaaaagtcttactatagtcataggcgggaggtatataaggcaccaggtgatttcatcattacattacacaatatagacctcgggttctccctaccgtttcaaacttggcccagttaaccgtatatagtctaaaagagttcaaacagaccgtttaagacccgtaagatataagcccattcgaagtccaaggaaactctagttagagactaaatattaatatagagctatatatataagcctaacctccgttactcgagtatgcttcctagtgcttccgtcagacctatctcctcgtaactccgattaagatacaacttagtgcctatctttattctaatagaatggattctatagtaggcttactagacccctttcaagctccatctaactctataataggaatatcttcgactcctcgcgaggctcaacagtcgggcagtccaggtagaacgagcctagaccaaacttgaacaagaattaagcgcctctagggctaccgagaatcaagcgatagaggagctgggccatatatccagattagccgatattttctttaaactcagtcaaattctaggcagcgtagtagattattagctaaaggagtgtggaactaaagaacccagctaagagccagagttaataaaggtcatacttgatatcttattaaaacagttagaagtacaggagttagctaatagcggtagaaattccgataatacctcgaaagcggtgatataaaggcagcggtatagtacagctaagttatagctaaaccagagcttaccgtacatcgttccttatttatatacattagttattacttataaaatgactgggtttatttacagcttagtcgtatgtagaaccgttataatattcttttatctactttactatagccgttcaaatggattcgtttctacatctgcctatatatatgccgttatattcttagttcagtttagaatacctctttccttaaagctactacaattatatttcaatttatactaattatagaaactaacagattttctgttatacttagaagctaacgcgagagctttaatatattctagaagacaacccttctaattatactattactgaatcgctacccccgacttaatctactactagactagaaaatgtattcaaataggaccacattcgataatcggtagctctatcgctagaattaatttctaaggaattctagaagtagaagatacaaccagatagctctaagctcgatatataagtctaatatagatatctctcttatattaatactaaatcatatagcagagggctattattaagatagtaaaggggctactccttaataaactaatatatatactagttattagtaggaagttggaatataggacaaaaaggcaagataggtatagcagagtggggggtatcatggtttattttcattcgtagtcagcggtcctactagaagataataaggcattattaggctaaatggttataataaaaagttctattaacgtaccggccgctactattcatactatatagggagtatatttattgagagttattatcgatttcttatagcatataaaaaccggtaatcaaatggtatatactaactgtttgtacctactatataggatatactagtcggccagccgtttaccggtaaagcagactagtggtacccatcttactgagtttaggtagcttcctctgtttaactggcctaggcgtataactagtccatccatctttaggcgtactttttagttcagggaatgacgcctgcattcagcgcatagcatataccttgcggcttttaagagtcctattacaggtgaataaccggtagggagatcttagaacatcttgagacatatcgctccatctatccgtgaatccttagacacaggattttaataacaggctccattatcttcaacccatcggcactttaaataatatatgggatcgccaataatttggccgaggagtgactgaagatagtcagagctccagtacatatttgactgctgatttgcaactgtcggcaagaatgcggtccatcaaggggcaatgtacccgccgaacaatttcctattgtagtagcacatctgctatgtagggctcaaatgcaggagagactctgcctcccacccaagaggatggagcttgaacgtgggattataacccttaaacagtgatctcatcatctcaatttggggttcatcggaagcaggcacagagcatgacttcagaatgtcaatacagtacacggcaagctagcaccttagtttccatactcacatgcgtacgcttggctaagttgctaccatcattacaggagggtgccgggtattattccgcctttgatcggtatccgcgaatggttcgaagaagagagagcaagtattatcgttttatgactctatacatttttattgccgggctcgtgagattgaagagtagttgtacaccgcagatttctacataccggcttagacttttatgcagaggttttcgcaatgacaacatttcccagctggtgcaatcaacttttctcatcgctagaaagtggaccgcctaaggcgcaaaatagtgcgcgctggggtttgtttgctaaatcgttctataggagagtgctctcggatgcattgaggaaatgctgtatatgaccaagatttacatctaaacgctcctcgattagccttcaacgctcgctaaagtcttaatcactcttaaccagctcttcttaaccactcttcttaaccgctcttcttaaccactcttcttaaccactcttcttaaccactcctcttaaccactcatcttaaccacccttcttaaccactctttactacagccaaaataaagagaattgctaactcgcgatatttggttttctagaatacctaagcaaatggtcgccgtttttgtctataatgataatggtatttctaagtttataacccataggacctatccttggcaagagaccaactatacaggtatatctgttttattctttaaggttaccagaaggaccgcgtgacctctaatcgccaaagccataggtatatatagacttgatatatagatagagcgaaaaatagagtaattatcattccctctaaactaaaaggaacttactaactactagtatcgtagatactttattcaagtaggaccatacctatatagtaggagttttcatttagaagtagaaagcaggaccttaagagtaatagatatcattaagacagtaaaccctctatataatagccttacccaccatatagtatctagaaaatctaaacttataccgataaggccggtctagaaccctataaaaccattaagtagtcgtatagttcgataattacctatcccctaaaagctaatataaaaggccaaagcgatttagtgccttaagtaccatatacttatactataggagtaatttagtgattactatatagcagtgtatcctttctagcttaggtagtattagcacaaccctatagcactactaatcccctagactagggataagctctttaactctattcttagtagctattactagagaataacgagcagtaggtaataggccatagtgaaaaatctactactacagtattatattatacccagagaacccaatcgctatatatatacttaaagagtaatatagtattaattaaaatatctttctataaagtagctaggccctaaaagttttatagataaactataatatacctatagttacattccttagtaatagtatataccatttagctattcgaatcttttagtcgcttttttatactatacctattagctaatagctatataaccttataatacctactagctatagcctattagaaagaagttctcccctagttgtctactatatttatatttatattaggatattctaataatattttgataattttaaccctacctagagctaatataaatattagtatagtaaaggaaaagtaatagttttagttattaattagcaaagatttttcggaactaactaggagatagataatatcgatatactctataattattataaccttaagtagtaatattcctaatagacttatttagttaatattggctaaattctataagagaaatttaaccgctataaactatcctatataatatattaactagagtagtagagatatattagtaaattaagggctcttataaagccctagctattagaagaggactttaattaagtctaaggagctattcgcaatagcctttactaaaggtatctagcctagcttatcggcacaattgaaatctagatttatttactataagaggaatttaactaattttatattagaattacttactatatactatattatagtatatctattcttatcttagtaattaaggttaatatatagacttaaaagtaaggctttaataataagcagcctttttttaatagggaggaaacggctatatcctttaataactagaagtaacagagtttcctatcgatagttaaaatagttaacattaactcaaggattttatataagtatttagattactctatagtcgctaatctctattactaggtatagtggtatttagctataatagtcgtagatattaatatttattcacttattagataaaagaagttagaagatataagtttagcgataggttagtgtaattaaaataggtgtaatcctatctagtgattagttattaagattaatattcactatattaaggagccgttcgataatactaacgcttctatatagaatagcgatcgagaaagtactttctcctaaagtattatactatataatatttactaaataatagcttaagagtaaactaatagcttctaagtaccgtaactttatagctaatataagcggtataaggctagaaaacttttagttaatatctgccttttcctaacctagaaagtattagataatacctaagcttctatatttaattgcctaataaattagcgggatatcttaaaagtctatataattaataaggctcttactaaagacgatataggatttccaagatataagatatagacttcgaaggtctttcttatcgatagatttaccaatctatagaagtagttctagtagaagtcctaaaagcggtatctcagcagattatatgaatgtataggtaacgactacctatacagataataataaaaggagggctcagagtaataatttagagatcaagtttgctactacaagtggttggcggaggagcttaggaggcgcatttctttatggtactggcttctatttaactatttttgagggcatattattgcagccagtacactaaataacgatatcaccgacacagagttacctaaaagtattgagttaccagctcctaggattatactacttgctcctgggatcctgcgactggtttctaggagccctaagaatcccgggagacagctatagtgttcccaggaaacactcaccgattcctaggagttatgcatcgtacctgagactctaatataacggacatacgaaaaccgagtcacctaactcctacgatctctgtttcttgtctcagggccaagtggcgccatcgtgaccaacatacaaaggtcaagcgcctcgccagccatattacaacctcctccaacccacaagtgtaccatcttccagttacatccaatattagcatttctcgagcattcaactttgctctaatcttttaacggctcccacttccacggattctatcctatcattttcgttcaagaaacaaacaatgggccaatactggctagtggtttgcccgtccaatcgcgagtacacaacacagtcatttggagggaagttatcagagttgctcttttcgtcgtggtccaacatactacgtgacctgattgaaaacgagtgggctggcactcagctcatctgtattggggattacttaaatccagacgacctccctgccacgattcaacaagacaagttccacctgagttccgctgagagcggtgcaacatccgagcccctccgctacgatgtcgttaagaaaacgtttggattttggtcttacgaagaagagaaagcagcgactctcacggtcatggaaaaaccttccaatcccaaaagtcgagtcctgaggaacttaactaccggtaaatatttctttgaggacgcgttgccatttagaatcaccattggccacatagttctgatgagtatctgttggtcgtcggaaagttcaataggcattacgggcggagcatatctggccaagggagtctgggctggccacaagttcgacattgtagatgccgacatggtggaacatatgaacagacaatgggaagatgtcaccgaggacgtcctcgatgaggttcaggctctgtggccgagcgatttcggacataactcggaaactgaatggagagtttaacacgtcctgggcaagaagctatgaaatcacttgacgtaaaagatatccggggatataatcctaggctaccaaacaaattgccaataagaatatctttggacacccttcccgtgatactgtacgaacaggtgtggcctgtgcgaccttcaaatccctgagtttctctaagcacaacgcttcaatcgattgcctactcgaatttactcgtcataactagccgagggaatgtatggaaaattattattcgaacgataagagtagaagttcattcagtagtaaggctttaaatttagacaagaagtttcaattcgcctggatagagtgctcgactgagtgcacctttaacttgcttcatagggtcatgtttcacagagagtaacccaaccagcaataatccctgcgctgaattcgtctgttccgaattctggagtattaaccccaccttcaggtaggacaagaaggccgtctccgggcacccagtgaggttcctgggtactaataagttcctggggccgcacagtagcctcctggcagtgcatgttatcatcctaggacgagcaagtttctacgtaaccacgttaaattagtggtcgacccacccttttttcaaggattttgtccgcagaccaactatagaatttgcaattccgttttaaacaagtgactgaagttgaaggttgctttcgatatgagtgctatgaggtttgatctaggcaacgttttctttataaggctattttatactcatatatataacatcattgagaagttacaaggatgattgaaatagcagatctcagaagaaatacatatcaaaacatacatggtacgttacattacctcttcataattacttactaagttctcttcttcatctatggcggtgcggaccatataactgtaatgtaactatttgtttcattgtaacaagctggctgtactaagttttcgcaagaacagccaagagttgctcgtgttattagccccaaacggtcttctttgcccagtaaagctatgttccggatagatctaatgaaatgccactggaaataaatcgattataatataaaggtatatccgcgagcccacctaaaaagacacttatcatgcttcagatttactacgcttaaagtatagggttttgccccttgagtttaatataccaaatttactccttatagacaagtatagtttagcaggtatctaagcgatccatttattaaataatcccttattctcgcacagccaaagagttccaatagtgcgataaggagtctagggtttaaaggtcggcagagggtcggactaccagctgatagtaaatttatacagataaagtaaaattccagtatatataaatattattaactaaagaaataatttagttaccgttccaattagcccaagatctagtatatctctaagaaggcttcaattccatccatacctatcgcagtaacgccatattaatatccgcgaaataaggcctaatctatcttagggtcaaattcttcctctgtaggtcatataacttctatttattctttgcgttaagcctcttaggggggttatagctatctagactacctaaataatactaaagcgactgggtttgtgccttagctctagtaaggggtctataagggctactaggagggacttagttattataaggcagattttacttactatcttcctataaaggtagattactatcacagctaaattctatggtaatagcttagtcataagtaggtaaagaggtaagatattcttacaaatttttcctctccttattagctttagtaatagtatagtatctagaaggctaactagtaaagcttagagtaggaggttgcggctattttatactactaatagaagttaccttatattctttatatagggaaataagtgattctagctaaatagtagcttaatcataagattggtgtatattatcactattaaatttaggcagctcgaggatttaaggattaatagccttaaggctaagagttattagccctaagctaagtaaggaaactaactctaagaagtatggttctactaagttactcctattactaatactatatttattataaatactttatcctaagtattattctagattccctttaatagataggagtaaggctaggataggaaaagaagacccttctagtatatagtccttatacttataacttagatataagtaatagtaaaatcgagatttcttagaatatcccttttatagacctattaaagatatttaggcttctaacttataagtacactttctcttactaggtagctttagattttactatatagtttccttaagcctatatatattatataagtaaagttagaggttatacttattatagaagctttaggaatatctatatattagctttatctaataatacctaattttagctaagtactgtcttttaatatattcccttagattattactttatagctagtattataaatacttttctatagagagatcggggtcctataaatagaaggggtagtagctaagacagataatagtataacgatagataattactttatagtattaggctttctaggactagagataggtattataataatcccgctattaacttaataaatactagtctatatatttatagtaaaactgtatctctaactctaatatttaaaggctaaatactttcttataccgaatatatctataaatataagcacttctattatattttcttaggctagtagagttagtatccactaggttattattaggttagggagcttaccttataatattaatttaataaccttttataggatagaggccttatactaggcttttatttaggagatatactatattaaaatcacagagatactatatctatagatcttcgataaagagaagttttttattaaaggaaagctctttagtagaggatatagctgttataattcgtataaccttaggtataattagtatttaagtatatatataaatattattttccgaatatattagctcttcttttctttaattaataactttccggtctcttttctcctatacctactgaatttaatattacttaagtttaaaaaggcgatattaaataagtgcctttctatattctaacttcttattcttaaggtaattcttattatagttctatataaataaatcgatctaggctcttatttctactatatctagtttttctaaaatactctctttaatctctactagtaacttacctagtaagctatatttataatattaaatataaccttagaagtactcgatatagttagactagtcttccttatctagaatagctcctactatatctatagaagaatagtaggcttaataatactttagaaaagtatttagcccctaatatactagtatctaactaataggtatagagccgtttctctctataataaaacttagtattaagatctctcccttatatctattatatttatatagtatagggggcttactttcgacttttttcctaaggttttattatatataatagattattactaatttactaaagtaccctatagtagtaaaaatttgatataggtaagaacaaaatttttattttattagaggtatctcctaaggcccgtccactataatatatctaagaactagtttatccaagtattcttccttctattataaccgaatcttactatttaaaagattaaactatactagattatctatagtatctaccctataaatagtattatatactaatataagggagagaagaatatagcctaatataaattgcggcctatttctatcctaaatactaattctaaatctagaagtactaattagtaaagtcctatatatttaataaatatactactatatccttctaacttatactatatattttttatattaataatttttaagctatttctaatctaccttctaacctactgcctaataacctatagataaaggaaatagaactaacttaatatactagaataaagattaatattatataatatcgctagagtaaagataccttactttatatcgaagacctcttttatatttatccttactagagggtataaaagctctaactcttactctagtaaagagatacagctagagagtaaataagataataactttaagtagtcctagaataaatgtttagtagttagtctactataaagataagactattcttaaaaaatcttactttataaagttaagtttctctttcttttaacctataacgatactatctatagttaaatttttttaatctactatatctaggtaagtttaagataatcttagagaggaagttataaataaaccaactatttttatttcctttcgattatctaggataattttagttcttataaattatttaaatctactaaagaatttctcggtatatatacttacagttcttactgtaggtagactattatcatttagtcgcccttaaatagaatttacgtactagtaaatatatactttaattatcttatatattagagtaggagaactaagggaagttttataatatttatacctattctctagatctatagtaaacctaaaggaaggttagaatatataaataggaaaggattactacttagatactatataacttactcgagctaaaggtttatagtttctcagtataattcgttagttttagggagccttttatctttctcctaaattaagtcctcctctttataggttctaggggtataaccattcttttcctactatagatagtacctctctttcacaagtttatcgcacttagtaaaaaaatcctttcggcctataattaatataaaagacgcttagatagaagatttgttaattattatatactaataccactatatggtttacttttatatctaagatcttaagctcgagccgctctaaagaagaaagatataagtaatattataaaatagataggttctctactccgtcctataccctttagtcatgatatatctccttgataagatatagtactccaaaaattgagggtagtaataatgctattaacgaactaactattatagtatagataaccctataggggctaatcccttctaggtatagtctgcggtaggctgagtgcatcagtattactcactgattagatactgagtatcactgagtaatcagggagcacctaatgagcacttactgagcacttactgagcatcagtcattctgtacgtgactgatctgagcatgatcactgatctgagcctgtactgacgtctactcagtgagcctgagcctaagcaccctcataaaagcggcggcagatcaaataggaaatccccatacgccagggaaaatccggtacgtataggtgcatacgtgaagttgacaattgaagtgctggtaccgttgggggtggtaacgctcactcgtacggtgccggctgtgttagctggcactacgacggagacagtcgttgcggtggacgaagtgggaacggcggtcacagtcccaaatgtgacggtggtggctccagcaagattggttcctgaaattatcgctgttataccaccggtagtcggccccgaagtggggttgatcctggagattgtaggcaaggacatttcgtgtcgctagtatcggtgctgggtttcaaagattgattgttataaatcactgtttgttcgacttgatcagttttcaaacctggagaaggagttgccgtgctttaagtatggctgttctcagcccaagtcgcattattgaggccattgtcacaagatatggcgtcgttcgatagtcacaaggtagcgtcaattgtttgtggtcatatgcattcttgacgatcctcaaggttgcttgaggtgtgtgcaaggtggttcaagtgttgatcaggtggaggtattcagagagatgtgggttccgcagcatcgactattccatctaggcccattcgacttgtcttggtatgttggtcgaatggtgcacagaatagaaagtgttatgtaattgtttgccactttgaggtcaagaattgtttgatatcactattggtacggagatttgcgtagcggacatcaatgaggcgtatgcgtagtggtataggtgcctgccatgcaaaaaaaaaaccccttttttaggtagtattgatgcttgaatgcctgaattaggtactattacagaggccttgatgggctaggtctgttagttgatcctctcaaatatgaaaatgaaacttttaatactatataaattcttgtatcacctggcaagttttaatatagactaggggccgggcctagttaatccgtaccgaaaatagagtaaacaacccaaaaagtggtgatacataaatctgtatggcgtcaaaagcttcattttgacatatgcggtgtaagacgcgggcttggttctagcgataatcaggcattcaggcatcaatactacctaaaacaggcacctatagctctctctctctcgggcacggacaccaccacagccacacgatatcttgtgatctttccccatgtttaaccccaggatggtcaatattccccgttcattttgtcttattgtccgcttttctggattgtgtatacgcactaatgtgttgtgactctgaagtcttttcaactgcttggtctcagagagattggtgaaactgctatcccaaaaataccccgatatacctcctggtctagtcgacctgttttccaagcgaatgaccgcgccaaaaggtcatttttacctttcgggatcatttctcctcccgattgaagagcaaatacagttcttgtcctagttgtttgaaggtaccttgtatcaatgcctccacacgccctccagtataaataacggatcagtatcaaaggatatctcaagagacgaagaaacccacgtaatcacaagcgcaggcacgaatgtagtcgatgcgaaacatcttgttcctcaagaaaatgatgaaaggattaccatagtccagaagaagaagcttagagaggagaaatatcttggttgggcggaagtgaacaaacgattcagtcagctggacactgcaaggttacatagtgttagtacgatgtttcacggtgtctatataagcttagatttcgatacttttggcgaaattatagttcagtcttcgatctttcttttgacccgtagcattctagatcttccacatgttcaagttatatatcttgtaatagtaatttattttctttattatatgacccataaaatcaatcgccctaaagtgattcgctgaacttatttagccgaaattagcctcagaaaatctccttgatagccaaaaaaatacgagatttagacctacttgaaggtagcttctcaagtctactttcgcttctattgcgatttatgccgagatctgcttaagttagtgaaaccagcgcctatgaatctaatctttagagtgctgtgtcacttcaaggttacatagtgttagtccgacatttcacgatgatgtggttttgaatagtaatagtgtaacgtggtggtactataaatccataaaaggacatcaaccgtcaagcaaaatcttggtcccagatctagttgtcttgtcgttggctaccttcgtgtattccaatgcgtctggttattcttaccatcctgtgtgctgtagcaaaagctgccttttctacagcacctaaagacaatctcaatgccctgcctaccggattatctgatagtgcaccatccggctcttcccctggccaatttgatggaatagatatccaaatcgacacaccaaaattcaatttatcaagcgatgacctcctggttcagcttgccagagactcgaatgaagttagcggagattctgaccctaacttcgaggcaacccagttctatatgtgctgtcagcaaaccaatacctcggccgtcatcgataactactatccaccgtatgcgtgtatattcggacctagcacgggtgtatgtcctcaagtcaattcttcatttccatttccatggctgtgcactctccctgagtggtgggttggtagctttgtgagtatataccatacactatatcagcacatcatgataacgcgtctccctgacaattctacgcagaactgttcataccagccttagctgaccttgatactacacccatattgactatcatgtgcatggtcgaaccgagacataagtggaacattctgtcatccgtgatgtcttggttatttacaatgcacagtctgccatcgaagctgctaaatatatgtcgaccagcaagccccacttctatacagtcatttcgttccctggctttatgtatttagtcagtaaccaccttactatcaatataacatgtagtaggttagttagttacttgagcaagcactcatttggtaaacagtctaaatcactactggcaaagtcctctaacctaattaggataggtaaaatgggacctccgaaatattattgggccagactaatggtcctagatagaccgcctttctataccgcctttctgttaaatatactgccaacctcgacaggctaggttatcttgaaattcttttacaaaaaaatacggaccgatttctacacaataaggggtcaacattgcctctgatcattcctcataaatccagtcactatcatcgtcactagaataccccccagtattcgcatcatcatgactatcatcactactgctcacaatctcgttttcctttctcggtttccttttcgtcaagactcgaaacctttttctgacagcttctagatgctgctggagctttggatcttcacagaaaatcccgatgacaacccctactctgtatatttcttggatctccgcaatcatcatatccatctttcctttcatgcaatttctcggccgtccttttggttttcggcgtttcaagtgaccgaaaggcgtgtatacttgactgtttgcggtagcggatttagatggctggataaatgtaagccgatgaacagatattgcctaggaacggcacaacaccacaaagactacgtcaaggaagcaaacgaaacgaggtatcagtacctttcggggcccagagaatgtcctgggttgtgcatattgcacgccgcgaggctgagccgccttcgaagcactctggctttgaggttgaggttgaggagcccgaccaagttctttcggcaagtttggctcgtataattgccctgtctgaacaagaggcgaacaattattcatggagaactggccactgcctggatcgctcatgaacggccgagaggtatggagactagggctcgctgcgtcactcgaaagtcctgcacccgttccagtagtgtcgttcttcgcaggagagatacacaacccttgtttaggcattgttagaggacccccagggatatcgaaccaaattggttgtttgtctggaggctgtggaatggaatctattgtgggactcccagaagaccgaacagcatcgctatcccatagcattgagaacccagatgtgtccatagtgcttgttagatctgttctaggaaccggacctaaacccgaggaagcatttggagacatgggcatgaactcgaatggagtcatgaaaattccatctggcgcgatagtctgctgcggacctggcaatgcagttccttggatatccttctgaggcctattccgaatacgatcccctgtttaggttaggatctattgccatggaatacatatgatgaaactcaaccgcggaacaacatactgaatcgacgctgagattccctattttgtcgtctcctcttttcgagcttgtctccatccgtccctgtatcgtgcattctggtgctgctcaactcaaaacttaaggcccgtttctctcaaggattttgtgggtgtctgagagcattcccgatgagcggggatatgtccatattaaattcctcccaggagacaaggtatctaatggaattagcttcttagtctgtaatgatctgcctatccacctcgcaagtcacctaattggtgcctctaaagcggggttcaataatccggctcgattcttctgtgccattattgcgtactgtctggatatttcttacaacagtctatatcgggattcggtgggaatcacttacctccagccatatttgacatttttttgcattaacagcctggtcgaccataaattatgtcttccaacaactgagctgtaaatagttgagcaaaaacgagtgtagctgacgtatgacttatttctgccctggtagtagtggctagccctgccgccggagatgacggagactgtcactctagtcacgccatgaacttgagtgaatgttttgttttgttttgaatagattaatcacattctacgagtcatgagctgaattagaactcccaactatgaccagggaccagggaccagggttgcacagttgtatggatatggtttagctcgactattgagtggtaagtgacttttagtcaaaaaaaaagaacattggaactaaagcgcgaccccggtcttacgggcgtttggtttgaattctgctatgagctaatactataggaaagttgttctaagattgaattcatgttcaggcttacagctcgtaggatcagccacagattgaatatagtagacaagataaatgtaacagaatgaacaaatagcgtccgaggtataccggcctaccaaaatcaaatattcagccgtaaaagcacgcgacgggattcatccggactccggtcctaatctaacctactcaaaagctattcaaattggacgtacttaggtcgagtggagcttggtccggcggccccgcgcacgggccccataatcgtgtggaaaaatatggtttggtgcctacacctcgtcttcgccttaggtgaacggttacggcattcccaaaaatggtctgatgcaatgtgaatgaagatgaagatagctaatagtgattttgattgaaatgcggaggaacaactgactccgtactcttcctcgaaacacgcactcggatagataggtctaggctttgttccttgattagcgcacacaggttgtctgcgaattataaactggctgataatcttaactaactaggtactagaaggtaaaccgactgttggaacggggcactacatgcaactaactaaccggccccttgaaattcttttaccaaaaatacggaccctcgcatgcggggtctgccacccatcatgacccatgtagtggggagcaaccagaaggaggttacctacgcgcccagcatagaatatcaactctcaaggcgtccctgaaacttagactcaaattttgataatgcattaggatatcgtagaatattagtgccgtacttacaatgaaagatcttaatgtgagaaaaatgagcatttagaccctaccagaactcgaccaatgtatgcacgcctcaagccacagcttggcagtaataacaataccaggcattatcaaatatactgctagtatataccggcttccaaattaggaggttgagagcacctaattttcaacttccgggggatcccaacctgattgcggagcgaagcgacgtacgtacgtacatgtcacgtggccaagttttctcagggggccagaaataatagcgttctaatgggccatcatgtgatcgtcagtcgcttcgctctgcaacgactatctcgcaggccgtcgagatcactcgtaacatcatattaaaatcaatgtatggatttgtgaaaatactgttttttatttggtggcatgcatgcattagtgaagttctccgccgggctgtcgtggtagggtatgtatcttttgtatggtctgtctatgttgtacggagtagtaaagatacacctcgcttgtgagagtccgtatttttggtaaagaaggttcaaggggcccggcgagagagaggaatggtgaattacttactccgtactccgtactccagttatgtattaggaataagtccgcttcctgagtttctagtactgccgtcccgattgggtgcgacgagcagtactccgtacagagttttctgtcatattctgcccacttccggcttacatagtagaaagaaatgcatttttaatggcgatgactacgaagtgtcttaatgagagaaacaacttgcgtagtattcgactgatgatggcggacaaggagaggaggaaaaggtacctaatctagatatgggatctggacccacttggtgtccgccttgctggacacccaacaattttgatcagaaaaaatcggatactttacttgattcctataggacttaaccccttgataatgaagcagttaacgatgaagtctttgacgataaagcagttgatgtgataaaagcgatctagttttgactaccccacccatacatatcaacgggaccctaccgccatatctcaaccaatcccccggtgacaacataaacattccaatttgttggacatggtggtcacctgaccatcagcccggtgcggcagaccccaacccccataactagatagtcgggcattctgccctttaggaattgacaactctctccctctttcatcgcatcactacaatagttatatcaattgttattgtgcgcttctaatattattggaactacccccgagagaagcgagattatccccttttgtacataaaagcctataacccatatagcttgtagactttgagagcaactttgaatcgtgacttttcttcagatgaatcattgaccttcttcagatataacaaagtcagataggatagaacaaagtaagcaatcaatgatatcattaaaataaggaacacatatattccaacaggaggttaattcagagcgagtctttgatagattcaagagttccgcggtcgctgaactcttcgtggtgggcttattatatctaaaacccgttgaggcgatgagcctataactacttctgggcagaactccgtaaagagttgcgtaatcctagggataagatctctatctgtatcctttgtaacttccaggaaccaactaaataagtcggggtttgaaagttgcgaggtctctgcctcgaaaagcgcttggattttgtccccgatatcctgccggatctcagcgatcgagatcatagcgttcatcaccacgccgggaatactacatccctcggatcgacagccctgctgctgtagttcctttggaaggtcacggcataccgagaatgggagtaggcattctgtacagtagggatactgttggcctgccgagatctttgcgctgataaaattgaccagattcaaaacctgctggttgactacctcggcatttgaagaaggacagtcggtgattttatgggaggcttcggcttgcgttttacctccaagacagcatagttcgcaccggtatctttgaagcatagaaagtacgacagtcagggcctcacgtatccgggttagcggttcatcgggttgatcggtaaggggccgtcactgggctcccgagcaatgagaggatggctcaaaatatcgcgagccgccgaattgggtagagtaggtgaggccatgacaggcaatgcgaggagtaaagctccaagccagggaacggctattatcgagatcttcatattgaaattcctttggcaatattgaattcctaagatattctggaacgaagtaggataaataaggctgcaataactctctttggcttttagttgagagtcgaatttgcaaagagttgcaaattatataaagaatgcttcatggcgttacctgggctttggaataaaaatccaatattactgatgactgtggggtgagcgtaatcaatggaaatatcgaattgcgtgctaggggtgacctccaatcttgaaaatggagacttctataagcctgcagatgtattggccaattgggccagccttcatggttgattgattacctgcaagcttatctgcagtctgagctgagctgacctaggccttaatacagtaatcttgaagcggaaagggtatggaggttcaaagggagaggcaccaagattaatcgagggagaaacccaatgattctgtatcagcgcggaatattacccatatattatattttgaaagaaaacaaaaatgggtcgaaagcaggttttgtcgattcccgctgtacggaacctcgctggtctagcggcattcctcattattctattgaatttgttcggcaactacctgttcgggagcctgaaatatactgctcaacgtagccttttgaaagccaaccttgaaccactgaatgaaactctcggggtatgtcactcctaaccacgcttggggatcctcaaaattaccaaaactgcttacacaatattacagttcgaaaggattgcggttgtatcatcgggaacatcttggagactacatggcctcgtcgaggcaaccgaattcaccaatctttacattgacgtgccatcccagcctgtttggacggatactgaagttgacgagtttcgtggttatcgggtccatggccggcatggggagcttggcccaggacaggcacggtgttggttaggccatctgaatatatggcggcaaatgctgttgcaaaagtggtccaccgctttgattatggaggatgacgcagactgggatattgctatcaagcagcagttgcttcgagtcgcacccctcatccaagaagtgacgggagccacggactggtcgtcaccttacggaaactcgtgggacctcctttggcttggccactgcggcgactatatccccttgcaactagcatcatttgtagatgagacgcttccaggatcaccaatgtaccgtgagaatgatgggagattcaccgagtttcctcatcagcagaggatggttcacatgtctgtcggcccgatatgcacatacgcatatgcgctcactgcttcggctgcgtcgaaactctatcaactttccagctccggtatggataaactgatcactacgcatttgcgagaatggtgccaggaaggattcttgaaatgtgtcacggtaaacccggagctctttcaccatcacaaacaggccggtgagatttcaagtgagattggagttgtcgaaggctgggagaatcgatcggcagttgactttacgcctaatatacgatacagtgcgcgatgcagtagcaagaaaaagaggcccgcggcctgccaactcgaatttgatccagtttgatcaagggtgattggcaagcagaatggtacaggttacggttccaaatatagccatgtataaagatgtatttgggtgttcactatctcctatgtagtttgtaggtctctctttcggtctccttaggtctcggtgaggtctcgttaactagttaacgtaatcggtaagcgagtggatcaggcaatgcaacctattgaattcaaatacatttatctcgaccacaacgccattaaattaaataaactataatcattatctatctggacatatctctcttctatgtcctggctgcctatatattccatacgctcgcccggccaggggaggtggtttataacggataaaggtccgtataagaggaaaacatatgtaagcctatataggctcaggaaggaacatctttattattatatatctattctgatatcgatccgtaaggggttcgttatatgaatataggcagatagatttccttatagttctggaccccctaggggccccttcgagactagtaagaatgtaaaggtatacgttatgcaggtgtacggcctgtcaaccgggtaagatacaaagggctttgtagagggaatacaatgtattgatggtatgccaagactaattcttaccagtctcggaggggcccctagggggtcctaaactataaggaaatctatctacctatatttaagaagataaggtagtatataataatttaaagagaaggtaactaataaggtatatactttatattttatacttcttttataagggtagctgttaggactagctaccagtgtatcctgaaaatagaggttcgaattagagtggaggtccctagtgtaggtcatacaattcagtagactaatcgctaaggttctaaatctcatatatacggtatatatatacccctggcgcttacttagtaagtatatcggcctatataggccagttatataagtgaccctcggggtcgtaatattacccccctcctttataagctatatcctcaaagctcttagtatttcctttaagaggtacttctttaaatatatattctttatcttagtatagcgacctctttactagaaaatacattataatagtaactcctaacttcctcttctaccctctactatatctaactataacccttaggtctttactaggaatcctactatagcctagtatatataatatataaatcggattaatactaattatatatatatctatatatcttatataggatcttagctaattaactatttctatagtatatagctagcgcttatataatctatctcctataggcttataccccctaatatacctacccttaggctattactattactagctagatagttatcccttcctttagctcctctactatcttctctataagtccctataccttacctaatatactcctagcagtctattataccctaggtataggctcttatatagaatactattatagcctagatagtaatcctaggatttataggaagtatagtaatataagaaaggaattattaacctttaatcctttaggtaataatatatcctttactataatacttaggccttatttctatatatccttagttaatagcctacttatagtagtagctataatacctctatatactatattatctttaggctatttatactagactcttagtcctatctcttatacctactattatataccttctatattatattcctactaatatataccacttcttatagtatctttatagtcttagcttatcttctttttctttataggttacccccttttagcttttataggtagtcttatatactcttcttttttaaattaatctaatatagtagtttcttctatatatacctaaagttcctatatattcttagtatctctataacctttttatttaactagatactctatccctttatagtagcttttaaggatatattctataatatattctaattctctattaactataatagggtctagcctctcttagcctatctataggttaccttcgaaaggttctaataaagatatatattatataggatatatcctataatacctagatagtaagattaattaataggcttacttccctactattcctataacctagaaaggtcctatatagtagtagtctagtttcttataaggtctccttaagttaatatatatattctttactaggacctagttccctattataaaggttttattaatatacttcttattatataatttctttataacctcttttaacttttctaggtatacccttagatctatttatatttcctctatatctttaatatattatattatatccttataaagatctattaagtcctcttatactaaggtataaaggtctaggttaaagcctaatagagcctttataggtactatacctagaatactataagtagagttattatagataaactatattagtagtagttagtatacctagttatcttagtactaattaatatatccttttaggtagtactctatattctaattttatctttttatttatctatttatctataggtagtaggtagttaataactagtaccttataataaggaagaaatagaataataactagaatttacttataaatactataccttagttatttataaggtttcctagtattctaaagagaggtataatatatttatagaataaggttataagtctatctacttctatatcctttatataaggaatatatagtgagtacttcgtgaatatatcgactataaccataagtatatcgtagaccttatcctaccactttatagggggtaaccctataataaagtcgatacttatctattcggtaggtctctatagtactagtaatagttctagtagactatatggcttatagtagtatactgcgtttagctagtaggtcggatagttatttatatactccctaatagatttatatatatcctactactagtattttattataatagcctcctttatatactaagcttaatagtagcctacttaggggttattatagtaaatatatataatcttagcgattagtataggttcctataggatatagaccttactattatatttaagtagactattatctagccttatactctaggctgtactttctaggtagctaccctagtcctattagtctatctttataagtttcttctatactaaggtatctcttatctataccttatatataaagtcccttatagactcctagggtttaggatagagtaatatcttacctataagggcttccttagcctccttttatattataagtatatatagggagctattagtatcttctatacctaatcctatagctaggtaggtaacttcttatagttcctctactctttagtagatagcttctttaagcttatatataaaccttacctagtgctatttattatatatagaggtttatatatagtctagcctcctacttagtatatcggctaggtttgtagagctagttctaaatataatagtgaagttaaaacttactatatacttagcctatcttacttatctgtaaggtagctccttcgttattataaagttcgttaagtttatataatctatcttaactaagacctagtatatatttcctttaaggaaatgtctctatttttagaaagcttctataatcgctagtatctcttagtctcctactctatagtaggtttcttctaaccttatcttatataagaagaatataattagtttctaaatactactctctttttataactataagtagattactttaattactttacctaatatattagattttactaaggttcttagtagggaattaaagtatataaagagaggggctttttagaaaatctccttaatctcttagaaagcctttcttatagctttattaaagtagaagcctagcttctttttattcttccctttcttctatatatctaggccctagactaatatattgagcggccctataatctttaagtataatttaataaacctatagtaaaagtttgcgaaacctataaattactatatatcgaagatatactctagttccggctaagtagtaatcgcttctacttagataaggtctatagagatactattgctaaagataataaatctaaggaactctacctaagaagtatagaaggtatacttcgaggcctttatatagagtttaaactagtagagccgttctaatactatttatatatattctatataagattccttatcctaggaaaagattaagatattatttaagtagattactaggaagatatctaataatcttataagagccttatttatataagcttagaaggttataggtatatttataagcctaaacggtattatataatactcgaaatatctatagtaggttctaaataccgttttttatttattacccttcttaatatagatcctatagtatatatctctaaggtctagcttagtatagacctttatactagtaagtcttaatagggatttactaattaagggtagggagtagtagttcttaatagtaattatatttaatctatagaagtctatatatagccgaagtttactatctttctttaatataaaaagaataggtacccctatagggctctttgaatattagatctagcccctcttaaggttcttgttaatataggtatatatagacatcggcaaagcccagcatgggcccaagatttcggcccacggcccaacccatatgggctatgggcctagctcccctaggcctagcccagcccatagcccagtaggctaagcccataagcccactagtagcccatttaggcctatttttatataaataataggtcttagtgtatataaaaatgcttacttagtagaatagtatactattacttacatgtgttttagtttcttaattgaaagacagccttttatgtcctagtagccttgaaattttagtttttatttatgaaataatttttaatatggccggtcacttattatttctagaaagaataaaaaaataaggccggtttagtgatactttatagataggctggtctctatatagaaatatatattatagtatagctagtaatgtaggtatactaggtatattatagtgaattataatacctatgcgaccgaatcctttgacctaaatactgattaaagactattaggagaattaagagatatctaatcctataatataatttaaaaatagtacctaaaagaagaggggggccttataaggctaagaaggtatcttaatcctattaagtatataccttttaaaattaaacttcttttatttttttctatttttaatagtatatattttagatttaaagtatattctttactctataaagctacctactaattttaaagggctaatatatatttctttatatatcctattctatagttagctatagtatatagtctaatctatatactaaatatagttattttaggataaaagggtatataggtactactatagagaatataaattatatttaaaattctttagactatagcctacttataattaattctagaaaatataaactaatatagagactagtatataggttaatatagagactagtatatagactaatatagagactaatatatagattctattattaatagaggaggtattctatatactatagtagagggagggggctaaggcctataggctaatagttaaggttcttaagagcctagttaagaggaaagagttaactaagtattagatttatatatttctagattatattattaagtaggagctatagaaaggataggaagactatactaatttttaataatagtagattagtataattaaggtttagtagtatatttaaaagaattaggagtatattaataaagtatactaaaaggcgactatactataaggtatataagatactaaggccttctttagatatattatattaaagttaatagttaagctaactagtaaattaattatagtaaaaataaactactaggatataaggcttactattaataataaggttacctaatatatttcttcctctaggagtagggtctagaagaattataagtatattaagctaattaatatatagtaggcctactttaggctatatagtaagtcgannnnnnnnnnnnnnnnnnnnnnnnnnnnnnnnnnnnnnnnnnnnnnnnnnnnnnnnnnnnnnnnnnnnnnnnnnnnnnnnnnnnnnnnnnnnnnnnnnnnnnnnnnnnnnnnnnnnnnnnnnnnnnnnnnnnnnnnnnnnnnnnnnnnnnnnnnnnnnnnnnnnnnnnnnnnnnnnnnnnnnnnnnnnnnnnnnnnnnnnnnnnnnnnnnnnnnnnnnnnnnnnnnnnnnnnnnnnnnnnnnnnnnnnnnnnnnnnnnnnnnnnnnnnnnnnnnnnnnnnnnnnnnnnnnnnnnnnnnnnnnnnnnnnnnnnnnnnnnnnnnnnnnnnnnnnnnnnnnnnnnnnnnnnnnnnnnnnnnnnnnnnnnnnnnnnnnnnnnnnnnnnnnnnnnnnnnnnnnnnnnnnnnnnnnnnnnnnnnnnnnnnnnnnnnnnnnnnnnnnnnnnnnnnnnnnnnnnnnnnnnnnnnnnnnnnnnnnnnnnnnnnnnnnnnnnnnnnnnnnnnnnnnnnnnnnnnnnnnnnnnnnnnnnnnnnnnnnnnnnnnnnnnnnnnnnnnnnnnnnnnnnnnnnnnnnnnnnnnnnnnnnnnnnnnnnnnnnnnnnnnnnnnnnnnnnnnnnnnnnnnnnnnnnnnnnnnnnnnnnnnnnnnnnnnnnnnnnnnnnnnnnnnnnnnnnnnnnnnnnnnnnnnnnnnnnnnnnnnnnnnnnnnnnnnnnnnnnnnnnnnnnnnnnnnnnnnnnnnnnnnnnnnnnnnnnnnnnnnnnnnnnnnnnnnnnnnnnnnnnnnnnnnnnnnnnnnnnnnnnnnnnnnnnnnnnnnnnnnnnnnnnnnnnnnnnnnnnnnnnnnnnnnnnnnnnnnnnnnnnnnnnnnnnnnnnnnnnnnnnnnnnnnnnnnnnnnnnnnnnnnnnnnnnnnnnnnnnnnnnnnnnnnnnnnnnnnnnnnnnnnnnnnnnnnnnnnnnnnnnnnnnnnnnnnnnnnnnnnnnnnnnnnnnnnnnnnnnnnnnnnnnnnnnnnnnnnnnnnnnnnnnnnnnnnnnnnnnnnnnnnnnnnnnnnnnnnnnnnnnnnnnnnnnnnnnnnnnnnnnnnnnnnnnnnnnnnnnnnnnnnnnnnnnnnnnnnnnnnnnnnnnnnnnnnnnnnnnnnnnnnnnnnnnnnnnnnnnnnnnnnnnnnnnnnnnnnnnnnnnnnnnnnnnnntatattatatatatagcctttctaagataattccttttaataatagagaaaataataggataaaaggaagtttttaattataagtaaattctttattaattatattatattctatactaatatttaaatctatatatattttattactatttttaaaggtaattaatatatataagtatataatagtcttaataaatagatattaagctaaggtattaggatttactttaattcttttattttctctaatatttaggatttactttcttttattatttaaactaatatttaaataataactttctaaggatatttatttacttagtaattcttatctttataaaggaaatatatccctattataatagctttaatattatttccttaatctattattaagatagtatttacttctaaagtatttaattttatattttagtattccttatatttataatccctatattaatcccttccttttctataattacctttatatctttctctaaaagtagttagattaataatagagaaactaaattaggattaatttaaagttattttaataaggttttctttttacttcttagactaagattactataattaattctttcttttagataataaaaaatagatatagaataggataaatattagttttaatattttacctctagtctttagtaagatactattattagatataattattatatctttaagaggtttctataattttataaaaagagtttatactttctactctttaatagtttttaataggtaatattctagtaatttaaagtaggttttaaagatatctaagtcttagtataagtatatctctactttattaaataaaactaagatatctataataatattataggaattttagagtaaagttttaatctaatccttaaatacttcttagttccttatatctctaaggttattttacttataaattacctattttcctttataatctatataaaggaaatttataatagctaaaaccttttattttcctaaaatatatttttttaaaattcctttaaaaaggatattaaggttatttaactagttttttctatttttaatattataattctttttaaatattataatatctcttttaattttattcttttaactatatttactttctaatattaaattacctttatttttaaattaatttaattccttttctttttaatatagtagggtttaataagtctattcctacctacatttttacctataaatattaaaatatatatctctatatatctatatatagtactactatactttacttaatttactttgaattaaataggattaaaccctatgccaatcttaggtaaaatttaaatttaatattttatataatacccctttgccttccgtactactatacatctacgccctatactcaaaatcaatgaatcaatcttcgattatagaatagcatcctatactatctttatataccttttaaatactatctaatcctccttagaccttcctatatatattaacttaggaaataacttaaaaagtttaacctttagctaccactatataggtttaattgggtttaaatctagtaagtatagcggccactcctctatatatatcccgtgagtttcaaaccattcctatataattttagtagtatagatctaagtgttatcttactaaaagatagagtagggtcgatagaatagaagtagaccttctttaagagtatctatataggaaatagtagtatatcctatcttctttaattctaggttaataatattctcctaccttataataattaactctaatcgactccctaactagattataccctaaactatttataaaatatctttaatatataccttagtatttataagatcttttctatagccctctaaccgaaagcgctaatactattatagtctacagtttattatttattatatagaatacttatccaagaagacctagttttaaatattatttctagactactcagagtgctatttttaaataaaacaatatcgttattgagctaattcctttctaattagaatcttcctttttatcctatattttagaagactagttagtcttaaaacgttaataatagtagagtaggatagataactaggtatagtataacttagcgttttataggaccaaaaggggtgccggcgggtgagtataaaaagtaaatggtaagttcgattactaaagatccttaggcgactagttcgagggagagatttaacagtattatattctttaaactgttttaaagtattataaatcgttcggcgggagtacctaaaatcgagtgctagctttaactgggtagtaccggcctagtgggtataaataatagctgagcgctgagcaatagatagcttacctgattttatacgacctaaaccaaggatatccttggttaatgtcattggggggtgtataggaagaagaaaaaaaaccacgatggttgttagggggatagtaagtggggcagtgggaacagactttttgaatactatgtatagagaatatctaagaatagctttttatataggatttttagtagtaagggatttaaagaggtataaatttagcc

SEQ ID NO: 16 - DNA, 235289 bp, Penicillium roqueforti
  misc_feature (2719)..(5484): n is a, c, g, or t
  misc_feature (6369)..(7199): n is a, c, g, or t
  misc_feature (41351)..(41909): n is a, c, g, or t
  misc_feature (188474)..(188628): n is a, c, g, or t
agggatgattgtaagattacgttccctatcaagaaacctcggatactattagtaaatctattgggtacaggtcatatcttaaccagaattaaaaagctgaaaagacaaggatggcttaaattgaaacgactgagtcaggctgtttatcgaaattcaaaccagatttcgcgtcttcgtgcgcacctatcattcttacaagcagagctcgaaaaacggatatcatctcgaaatggttcattgaatgccattttgtgtatacaggagctgactcaagataacctatccccaaggcgaatatatttgattgggtctttgttagttcagcattatctcgagaaatggagtaaggggccagttgatagaaataggatagatgttccggggtcgaccgctctgttaattgaccaaattccttccctatacacgtgacattatttttagctactttaggcagaagtgatatcgaagtattatctcatcggtcatacaataaacaatagcacaatgattaagttaaagctggtactagctttcaataattctacattgcgacacagcatatattacttcaagcagtctaggaaacttcttaggtagcgatagctttcgatatattaaagggcattaccaacgcacaagctataggaaaagcaagctcccccattttaaaagttctatcagattcaaattacatgtcgagggacactatatacagtagtagttataccagcttggtcattgaacctatccgagaatgattatgggccgaagatctgacttcgccagcctgatcactcataactgcatgccctcctattccagcggttaatgctgtcaattatctgcctaccctcacagcacctatgtgtcgtagactcccaatctctagtagtttatcggccacatttatctactactacccatagggtgaggcggaaaatcgcgctagccttgcttatctggtttgccagaacactgtcctcgtcaaataagtaccatatcttaaagttttatacaagtgcttccttgaattgcgatacaatatggttctcagttatcccattaattgcaaaatctccctcggttgagataactcctttagcttcttgcttctagggttaagaacatcctacagtattacagtgtcaaagccatccttataatggttagcagtattattttctattagtggttcaaccgtatgattagtccatcttttctactattacattgccaacccgtagatcgtcattcggctaggagtatgggaaattctatacaaggctgatagcagatagtagagctaaacattgctcgcctctatagtgcacatcctgtgtggatcggaacttctcgataactatgtctcctgtaagagtttgtattagtgggctcctacatcgcatataagcttgtggagagagctactgtggtacaccaagtatattatagttttcacgtagatatatagaattaaggaaattcctcctctagaaatatcactatagtagagtgaccagtcgtactcaggctacgataccaggctagcagttcgaccatcatcttctaccctacaatgaggcttgtaggtcggtgtacattctcctaataggctcgaagacaacgcgcgctaaacgtgatccattcactaggcagagctcttcgcattccacttaggcttcacatgctctttcaaccaggttacagattgtgttctgaaaatttcggagaagttgatagacaaaatcagtcgagcgctcggtgccggatttataaagcctttgtagttcggtgaacgtatgttctgtaagctcttagagtagcttgaaaagggaatagcaatcgcggtaatatgcattataagcttattattagccgatctgacgtacaatctatacaatatcctccatggtactatcacagaagagagaaagaatcacaatcgactctcaggttctgtatttacataatgagagataccaattacatagtcagagagtcggtcggtcggtcggtcaagttgaatatcggtaaggcgaaaaaggaacttttggcaacccaatataaatatactcatttctgaggttccggctattaagataggtggttattacagagacaatggttcctcgcttcaccgtcctatccctcaacaacgcgcaaagcgtcattgccatcctctatatacccccataaacatcccatctcatagtcaataaggacactctgagacccactcttgcctacaaagccaaatgctcgcccgagggattactgctcgagagagccggtacttactttgacttcgcaaaatagacactctcaattaccgaaacctacgcaactatgccatcggtatcattgtgggcattcttggattctcctactttgttatttatttactattattcttgattttccacttcccctcgtctcaacagtcaatcctatacactctggcagtgatagcgtttggtagaggaagcgccatatggtatctagatattgtctttcaaaatagcttcagtatattccagaagacaaaagtaacgaaagagcaagattccatatggtttagtggtttattcctggtctagacagcagctcttcccacaatcgcttttctctttccagcccaaccactgatacagcttggatacgcatcggctttcaccctaatcgctattagaagcctctcggacggttatctcaaagacannnnnnnnnnnnnnnnnnnnnnnnnnnnnnnnnnnnnnnnnnnnnnnnnnnnnnnnnnnnnnnnnnnnnnnnnnnnnnnnnnnnnnnnnnnnnnnnnnnnnnnnnnnnnnnnnnnnnnnnnnnnnnnnnnnnnnnnnnnnnnnnnnnnnnnnnnnnnnnnnnnnnnnnnnnnnnnnnnnnnnnnnnnnnnnnnnnnnnnnnnnnnnnnnnnnnnnnnnnnnnnnnnnnnnnnnnnnnnnnnnnnnnnnnnnnnnnnnnnnnnnnnnnnnnnnnnnnnnnnnnnnnnnnnnnnnnnnnnnnnnnnnnnnnnnnnnnnnnnnnnnnnnnnnnnnnnnnnnnnnnnnnnnnnnnnnnnnnnnnnnnnnnnnnnnnnnnnnnnnnnnnnnnnnnnnnnnnnnnnnnnnnnnnnnnnnnnnnnnnnnnnnnnnnnnnnnnnnnnnnnnnnnnnnnnnnnnnnnnnnnnnnnnnnnnnnnnnnnnnnnnnnnnnnnnnnnnnnnnnnnnnnnnnnnnnnnnnnnnnnnnnnnnnnnnnnnnnnnnnnnnnnnnnnnnnnnnnnnnnnnnnnnnnnnnnnnnnnnnnnnnnnnnnnnnnnnnnnnnnnnnnnnnnnnnnnnnnnnnnnnnnnnnnnnnnnnnnnnnnnnnnnnnnnnnnnnnnnnnnnnnnnnnnnnnnnnnnnnnnnnnnnnnnnnnnnnnnnnnnnnnnnnnnnnnnnnnnnnnnnnnnnnnnnnnnnnnnnnnnnnnnnnnnnnnnnnnnnnnnnnnnnnnnnnnnnnnnnnnnnnnnnnnnnnnnnnnnnnnnnnnnnnnnnnnnnnnnnnnnnnnnnnnnnnnnnnnnnnnnnnnnnnnnnnnnnnnnnnnnnnnnnnnnnnnnnnnnnnnnnnnnnnnnnnnnnnnnnnnnnnnnnnnnnnnnnnnnnnnnnnnnnnnnnnnnnnnnnnnnnnnnnnnnnnnnnnnnnnnnnnnnnnnnnnnnnnnnnnnnnnnnnnnnnnnnnnnnnnnnnnnnnnnnnnnnnnnnnnnnnnnnnnnnnnnnnnnnnnnnnnnnnnnnnnnnnnnnnnnnnnnnnnnnnnnnnnnnnnnnnnnnnnnnnnnnnnnnnnnnnnnnnnnnnnnnnnnnnnnnnnnnnnnnnnnnnnnnnnnnnnnnnnnnnnnnnnnnnnnnnnnnnnnnnnnnnnnnnnnnnnnnnnnnnnnnnnnnnnnnnnnnnnnnnnnnnnnnnnnnnnnnnnnnnnnnnnnnnnnnnnnnnnnnnnnnnnnnnnnnnnnnnnnnnnnnnnnnnnnnnnnnnnnnnnnnnnnnnnnnnnnnnnnnnnnnnnnnnnnnnnnnnnnnnnnnnnnnnnnnnnnnnnnnnnnnnnnnnnnnnnnnnnnnnnnnnnnnnnnnnnnnnnnnnnnnnnnnnnnnnnnnnnnnnnnnnnnnnnnnnnnnnnnnnnnnnnnnnnnnnnnnnnnnnnnnnnnnnnnnnnnnnnnnnnnnnnnnnnnnnnnnnnnnnnnnnnnnnnnnnnnnnnnnnnnnnnnnnnnnnnnnnnnnnnnnnnnnnnnnnnnnnnnnnnnnnnnnnnnnnnnnnnnnnnnnnnnnnnnnnnnnnnnnnnnnnnnnnnnnnnnnnnnnnnnnnnnnnnnnnnnnnnnnnnnnnnnnnnnnnnnnnnnnnnnnnnnnnnnnnnnnnnnnnnnnnnnnnnnnnnnnnnnnnnnnnnnnnnnnnnnnnnnnnnnnnnnnnnnnnnnnnnnnnnnnnnnnnnnnnnnnnnnnnnnnnnnnnnnnnnnnnnnnnnnnnnnnnnnnnnnnnnnnnnnnnnnnnnnnnnnnnnnnnnnnnnnnnnnnnnnnnnnnnnnnnnnnnnnnnnnnnnnnnnnnnnnnnnnnnnnnnnnnnnnnnnnnnnnnnnnnnnnnnnnnnnnnnnnnnnnnnnnnnnnnnnnnnnnnnnnnnnnnnnnnnnnnnnnnnnnnnnnnnnnnnnnnnnnnnnnnnnnnnnnnnnnnnnnnnnnnnnnnnnnnnnnnnnnnnnnnnnnnnnnnnnnnnnnnnnnnnnnnnnnnnnnnnnnnnnnnnnnnnnnnnnnnnnnnnnnnnnnnnnnnnnnnnnnnnnnnnnnnnnnnnnnnnnnnnnnnnnnnnnnnnnnnnnnnnnnnnnnnnnnnnnnnnnnnnnnnnnnnnnnnnnnnnnnnnnnnnnnnnnnnnnnnnnnnnnnnnnnnnnnnnnnnnnnnnnnnnnnnnnnnnnnnnnnnnnnnnnnnnnnnnnnnnnnnnnnnnnnnnnnnnnnnnnnnnnnnnnnnnnnnnnnnnnnnnnnnnnnnnnnnnnnnnnnnnnnnnnnnnnnnnnnnnnnnnnnnnnnnnnnnnnnnnnnnnnnnnnnnnnnnnnnnnnnnnnnnnnnnnnnnnnnnnnnnnnnnnnnnnnnnnnnnnnnnnnnnnnnnnnnnnnnnnnnnnnnnnnnnnnnnnnnnnnnnnnnnnnnnnnnnnnnnnnnnnnnnnnnnnnnnnnnnnnnnnnnnnnnnnnnnnnnnnnnnnnnnnnnnnnnnnnnnnnnnnnnnnnnnnnnnnnnnnnnnnnnnnnnnnnnnnnnnnnnnnnnnnnnnnnnnnnnnnnnnnnnnnnnnnnnnnnnnnnnnnnnnnnnnnnnnnnnnnnnnnnnnnnnnnnnnnnnnnnnnnnnnnnnnnnnnnnnnnnnnnnnnnnnnnnnnnnnnnnnnnnnnnnnnnnnnnnnnnnnnnnnnnnnnnnnnnnnnnnnnnnnnnnnnnnnnnnnnnnnnnnnnnnnnnnnnnnnnnnnnnnnnnntgcgaacggacggaattaatatcgcactttgcacccgcgatatacaatcattagccaatggcatccatagggtagcgagtgaggtcttagattaataagagcacgcaacaggatctgaattcattagtaatcgtgcgtcaaaggcagcattgaatataatatctaatgatataccttacaatttagtaccagcttcatctagattcaaatcatcatcggtattatgatattatccatagactgtgaacgtaggctaccagcgatataagctgtaagagcttcgagctaggggcttgataaaaggatttcccagacagtaaataccgagacccttactatagtttaaaccgacaattataacatacattatggctttgatttctcatattttcacccataattactatgtttatttagttcattcgaaaaatttcactctgtcaaggcagatatggtagtcaacttcgtccaccacaattgtaacgtggcatttacttcctaaagtactaggtcgctaacctcctacccaccttttaatattcttctatctcggtctaaatcttagcttaaattcaaattccatactgacctcatacatatattcaatcgcgcatcaaaacatagaaggtagtctaacgatcattctttatataacacaggaggccacgtcgcgataccaagatactttcaagtacctactaagcctaccgcttaagtgttagtactggaggttcttatccctcagacatatctatattatagtggacgctagatagataccctttctactgagtcttggcagcaagaaaagcctttcacccatagcagggacccgagtagaaaaccaaggctgttacagtctggcgtccagtagagccatcagannnnnnnnnnnnnnnnnnnnnnnnnnnnnnnnnnnnnnnnnnnnnnnnnnnnnnnnnnnnnnnnnnnnnnnnnnnnnnnnnnnnnnnnnnnnnnnnnnnnnnnnnnnnnnnnnnnnnnnnnnnnnnnnnnnnnnnnnnnnnnnnnnnnnnnnnnnnnnnnnnnnnnnnnnnnnnnnnnnnnnnnnnnnnnnnnnnnnnnnnnnnnnnnnnnnnnnnnnnnnnnnnnnnnnnnnnnnnnnnnnnnnnnnnnnnnnnnnnnnnnnnnnnnnnnnnnnnnnnnnnnnnnnnnnnnnnnnnnnnnnnnnnnnnnnnnnnnnnnnnnnnnnnnnnnnnnnnnnnnnnnnnnnnnnnnnnnnnnnnnnnnnnnnnnnnnnnnnnnnnnnnnnnnnnnnnnnnnnnnnnnnnnnnnnnnnnnnnnnnnnnnnnnnnnnnnnnnnnnnnnnnnnnnnnnnnnnnnnnnnnnnnnnnnnnnnnnnnnnnnnnnnnnnnnnnnnnnnnnnnnnnnnnnnnnnnnnnnnnnnnnnnnnnnnnnnnnnnnnnnnnnnnnnnnnnnnnnnnnnnnnnnnnnnnnnnnnnnnnnnnnnnnnnnnnnnnnnnnnnnnnnnnnnnnnnnnnnnnnnnnnnnnnnnnnnnnnnnnnnnnnnnnnnnnnnnnnnnnnnnnnnnnnnnnnnnnnnnnnnnnnnnnnnnnnnnnnnnnnnnnnnnnnnnnnnnnnnnnnnnnnnnnnnnnnnnnnnnnnnnnnnnnnnnnnnnnnnnnnnnnnnnnnnnnnnnnnnnnnnnnnnnnnnnnnnnnnnnnnnnnnnnnnnnnnnnnnnnnnnnnnnnnnnnnnggtagttagggggcggggcccgccatactggccgatgaagtctcaactcttgggttatttcttttacaataagaaaagatataaagagctggggctgatacttatagagacacagcagaggtcaattcagtatcacaccgggccacagtgatcatcataggcgcgataagttggtcctttagtggtatcaagacgtcagtgttgttcgtggtttagcctacaaggcttagcacaaataatcagacccggcgcagcagtaggcgttatatctcataaaccttagcatagaataaaatagaagtctcataatttcacataacagagctcgcacttgaaagtccacaccctattgttaaccagatattttaatttacaaccttccactctaggcatactgcattattcggggccaggaatagtatatatgccatggctttacgtagagtactgccagtagtacagggttatcagggccgctctggtgagctcccaaaggttcactgtcaattatagtcaagaccagggattaagagacaacaagaagccgtggcccttgccctagtatattgtggtcgaacttccacggatctagttgccccgcgtctttcgggtcagcgcatttataaggatttgtgggcttatatacctacagtgtaagcagttatacttcaaacttaagatacaaccagacccacgatagtagatcagctcagtcggctactatagcagagacgtcttcgtatagtagataccttaactagtcaatccaaatctttgatcttcgatcggctggctgaataggtcagtgaatcacgtctcttataatataggaactgtctgatctactagtctcgatatatactacaaatgtcagtacagtacaaatcccggtatataccggtccaacgggagaacttatcgagtgcatcagatataagcctctcaacaggatcaagtagataaatcgtagagcaaattgcaggggtagaggacacatctacaggcttctcagtctctatcacttaccaacttggtagcaattaccaaaagacatagttcttaattgaggcctattaagacgccttatacatttggcagtaactatttgcagcgatatctttaatgtttttacgtacttagcgagagagacgagtaaaagaggtattagcaatgaaagggataccgagttgttttaaactaagtggctctgtccgtctagactacggaaagtgaggtcacagtaggatatatgggtgctcgacccattaacccgttaaagcttggccaaacatcgtcaacactcaatttttgaagttatcaccaacctgcgaggatatattcttttttttttcttttcttttttttttggtgactcttcagttctataatgccgtttgccaagtttttgaggcttccaacgaaagtagaagtaatatctagttgagatatctttcacatcaatagccgtctatatctggccctcaacattatcaggcttaatcagttttcccgaccgactcgttgatacccccaagcgcccgctaaaaataagagcaaattctactcagaagctaactctattgattgactgatacaaggatcgtaaaacacagtctataaccatatacgtctacgttatctataagaggcaccaagaatcgatggaaatggtattgccctactccttgactttctcctgcaaataaatggattccctaaacagctcgccaggccaggaaaaagaaggaggacagcagcccagtgaatcgctagtccttagtgacagggaaaaatcaatggaaaaatcactagaaactcctgactatatccctctatcggtaagtaaaaccatttagcttcatttacttttgctgaatattgcagccctcccttttacgacacgataaagaaatcaaacatactttagcgatcgagccctttcaacctattataaaggtactagcagacttcgaacgcgacgatctcaagttcgcctttcccgcggctcgactggtcggactctatagacgcctgtaggagtcgtgcgtgtccaagcatatcgatggccagaagctacagcagagtaatcagatattaaaggaggctggtacgcacctgagaagagagagggacggtcttcagctataccacaagaagcagctagctcaactgcgctttttcgaacaggctttagaatcaactcaggaacgactgattagtctactcaatgactagaactacccttccaaacccaatctggcagggctaccaggcatggcaaaagaagggtaaaggattatacattcttaatcgtcctatatcttattcttacacaagaaatatccaccaatatcgcaaataagagaatcatcgtgtaaaaaagtagctttttttcattctcctaaacaaaaaacattcatgtggaggcggccatttctggcgtcaaagggggccgaaagtggcctcctcggcatagctcttccgcacacgtactttcggccccagagccacgcgctcatcgcctacccctagagaactctgtatagagacaaacgaatttaacgctatagtacgcacgacattacgttatcattatcaatacctccctcgcactcgcattccctaaagttgaagttcaagaagaacattcttatcaactgtttttttaagagccgcaatagcaattgccggcaaaactgtcagaaatgcaatactctcatcattgttcagaaattcttaggcgtagcatgaaattgccttaattatggcatcccaaagctcagtctcaagaggtagaagagtggcccagatctctcacataacaaatggatatctctaggcatttttgtcaatccagttgacgagacgagttcttacaagctgttttaggggcgcaatgtcaaatttgtcggctgccataagaactcctaggttattccacaaaactgcgtgagaatctttatcttcgcccgagacagactgcaacagattatagcgcggtatactgcgaacttacagccttcgcatgatatcgttaggtcggagtacctacctgattccaggaggctttgcaagagtagttgaagatctggaaaccccatataaaatgagagtagtaaaataacatgagttagtcaacgcaccgggcatctgtcatccgatggtttttataattgcccaactatctgtaatcctcgaaggtatataacgtcaaacccacgacaccaagttccgcgtataacgaaagtagaaattccagtggcagcccatgtactccgaggaaccctcacttaagccccaggaaaagacatcgggtagctacctttatatatttattaatatggatacctattggctacaatgtgctcaaattcactgtgccaggtttcgcgctaggtaggctgggagtggtacaaccaaaaaattccaagggaatatataccagagcaaccattagtagacataggcaatgtttaggttaggatgataaggtacagacgcttaataaattgtctaaaaacatatgagtttagattcgtgtacaatactatatcgaggaaagaaaagaaagcctgtattatcctaccataatcgaaacactatggtttccatctactccatttcccgtgcccaagaaacgccctcaacgactatatgattttaacctccaataggtactccacattcagggcatctagcttgctccatcggcataccgcactctccaatagcaaactatagaaaaaattatttagttcgtcaaaggtaacttagggcaattcgaggaatgggaaatttactcaccagatgtccagtagtgataaggtacagacgcttaataaattgtctaaaaacatatgagtttagattcgtgtacaatactatatcgaggaaagaaaagaaagcctgtattatcctaccataatcgaaacactatggtttccatctactccatttcccgtgcccaagaaacgccctcaacgactatatgattttaacctccaataggtactccacattcagggcatctagcttgctccatcggcataccgcactctccaatagcaaactatagaaaaaattatttggttcgtcaaaggtaacttagggcaattcgaggaataggaaatttactcaccggatgtccagtagcgcaattgtaccagtgcccagaataagtcgccattcctcctcgtctactaaccatggccatcttgattaactgaagttcttctaaagtgattgtttcgtatcgcgtttcctcatagaggcggaccatctcctagaccttttgttaaagctcaggacagttcctcggttcgtcgcatagttttaacgcagcggcgaggagatcgtgggtggtttagaagtaatcttagagattttctagaccaatttttcctttgagatatagatcgcttattgtttcccctggataagagcggtgataccacgcgtccagctgggcgatcttagcgaataagatggtcgccgtgatgacgatgcgggagaaatttccttcgttggcttgagttatcaagtctcgacaatccttcagaacttaaatcaaggctaatgatagtttggcaaagcttagaagtggtagcgttacagattttccgcttgaatctatcactctaaaggcatcgctaaacatgacttccttggacctgatataaattaaccgtgcaccgagggtgatttggttatcggatttatattgctatattcatcgcctccattcgggctgagagggaggctacatcgtcccttggtgacttctggtagatcgcaatcgcatccataagtcgtttcatcggctggttctcggcctccatggctttgctgagagctgagagctagagcctccgtgcatatcgtgcttcatgttgtaatttagtctccctcaccgccaccaacgctcgctcagagttgagcttgtcttcaatgtcattcagacgcgattcatggccttcaaggtctgtgcgacccttgataaggaaccgcttacaagtctcatccataacagcacggttgataacacgattttaacgtttcgtcacaaactgacgaatgggctgcttacagtccgatcacgatggtatgacactggcaagagaagaagagacatcgattgaacagacgtcttggagaccgtcaaatcttccatctttatctttcgtgtatacttcatccaggccaaccaatccatcaaccgactcacttgtaaagaaatgaccgcatccaagcatgatgataggagtttcatcgagactgatttcggaataagttttccattcgaggaagtcaacacgagcgtctcccttgtcgccggcactcttgacacagattgtttggacagtcttccccgcagaggctcgggcattgatggccgcatctgaggatcttagtgcatcgctcattgcagggaagccgttcgcatattgccgcgcaacgcattgagcaggagcctcggtgtttgcaggaccaggtgcatctctcgatgcatggtgcacatgcctttctgcaaatcaagtcgcatgctgagtgtgagcatctaatctgtacatatgattaatgtctccgatacgatgaccagacgatgaattctaggattctgacttcgcaatttgcctcgcagtaaccacagctctcctcatcatgacatatcttcggacagctatgattgcaaacaccgtgggggcggtcacatcttttcgtgcacttcgggtactcaaatactcttcttccgtcatggacttcctcgagacaatttccgcagtaatcactgcagttgtggccacaactgagaatgtcgctgcagggcttagagcaacggaagatcggggacgtgacatctttgtaacagccaacctgaattgtatggccacacttaggaacactcttttcgaccttggcgtcgcacctaatgactttcaggttaggcatttgatggcaaaagatagctttcttgatattaccacaaggaagctccacgtcttaaatcttcgccatgcagggtcataatcttcactataaagcttggggcattcgtgctcacaggttgatcggatacatgggcaaggtttcccacgcaaagccgtcgtgcatgaccgccgaatggcacttggcctggcattgatggccacatggatcaagtcgacggtcgcacgggagactgcacccaccctctggactcttcctttcgaagtcgtgaggctcagagcatagaataggcctatctggatggcgagggcagcacagagccaactccataccaactgcattcgcacgggagagctgagagtggacatcggcccacattggcacattttgctatgtttcagcatttccaatcagatacatgccgtgctaagctcgactgaggagcacgttaatgcggttttcggtgcctaggaagccaaccttgcgctttgagttgctgcggactagggagacaacgatcacccttgcctcctcgccttggaagttgtcgacggtagcaaggcggagcgtctggagcaacgtcttcttctcgagtgccttgcgactatttgactcgggattttcatcttcagccttctcaaacccatccgcagccaaggtttctaagtctcgttcactaagacaaatctcaaaatcattgctaagcgatgtcctgagcttccgcaactgcccggtatatggagttaagagggcaatatccgtgctcttgtactctccctgccgaacaagatgccgaacaagagcagtagccatatcgacctcccactggttgctatgagacttcacacggctgccatcatctctcgagtcttcatcgcaaagatggtccagccagaagaggttgttcctcattccaacaacattgggtacagtcgtcacgctttcatgatcctccagtttgggatagacgctcctgatatgttgcgagatatcgggtctcattcgtcgccgtacattaagctgtgcaatacgggcaggattaagacctggttcaccgagagcgcgtctctcaaactggcttctctctagctgccacgtctttcttgtggatgattcaagactaagtgaatgattttgaatctgtggtcgcagctgtcgatgatccccaatctgaatgaagtgttcaactcctggcatgagggctgaaattacgtgggcttccattacctcagctgcttcctcgcatataatgacctttgttcctactcggcgcagtgtctcgatatggcgcgcaagggatgtggtcgtgatacctactacatctccttgaatcaaggctctgcggttgacctcttcatggactgcattgatgtctccgcgaagatttgcagcgtgatcaagagcctcgaaaagcgaagcggtttcgatttcctgccactgtctgaaccagctcattgcaagaatctggcgttccggtatcgagagactgtgaatattttcattcgcagcgcgtgtgaggcctttcaagcgcacatcgtcaacttcactctcattctggtctttctgggttttcatcgatttggctccaagccagttgagtaatttatcatcagtgacagttgtgaatccttccgtgtctggtcgctccagctgttcatgtatgatgggccattttcggtgtaaaaaatgctccattgcggcccaagacaggcctttttgagactggtgtagaggtttcattgcatatccagcgttcttcatgcagtcctcaagtctcccgtaggacataccgagggtttgcgactctaccctcgtcttcccaatgcctttactgacaacgcgaaggttcttgccttcaagctcagtggcctgactgcggccaccaatgcgtatgattttctgataccaacatcaagaagatgctttaagaattaggcttagcttttccttttcgttgatctcaaggagaacttgaacaagcttaacgcccaaataggactttccggtgcccggtgggccttggatgagggcatactctcgtgtgagagccgcgataagtccctggcactggccatggtcgagaccagtttgagtttgcagcttcaagagattaatagattcaggggtaatagggtccaatgcaaccttttcggcgccaacagttgtgatcgaagtcaggggaaagataagtttacgcgcctatgccggtgggggtacgctgtgaccatcttcgtcatccttacagcctggcaagatccatttttggaatgccaactctccttcgcattgcagcctatcggctttatatcctttgatcagacatgtttgcctgatgcataccgtcctagggcacggggtattctcgcgccattaacatgtattagttaatttgcaccgaaattacgtcactgctaacgtgacttagggtattaccctttcgggtaattccctatctgtgtttttagccatttcttgaacttacgcttaagatgtacattacctagtgaaatggtttgatatatgttgcaaagtctcataaatggtttggcgtatggctgtttctctctatctttgattttcttacatttttatagccatggggctacggatgcggaagagacaaacgaaagatagttacagtggtatttcacgcttatttgcaatccagcatctcaatttctgaccgtctgaatacctccactttgagtgtcatgttattcatgatggtttgtctttggttcctcgccagttaaaataaatgtttaactgattgatcccaggtctgaaattagacaaattagtatttccaagatacctcacttttggatcgggataggctcggggtaggctcagggtagctcagggtaggctcagggtaggctgggctgtggcaaaattgggtctcgactccgatggggggaaattgtgtaagttccccgcactgtattgtcacacttagttatccattacccgccactaccgctatatgttttttatggtaactttacaccataccggaagaatatgttgtaatacactgtaatcgtgccacgccgccaacacaactttcaacacgggagagtgttgatgggccgggggcgattacatagatcatggaccatcttaatagatcctcagatcaattgtcttatcactaattggtcttcctcgatactgcattttagtagtatgcagtatactggcggatatcattaatttggctgtaaagtgcagggtgtatatcaccggttcgaacacgcttgaagtccggtgcccgttttacttgtcatttcaatctaggccttagctgtggtattataccacagtttcatgattcggatagagggtagatgagggtagatacataccaaaggcccggagataaggcacagaaaggtgcactggtggcctcgtctttccatcagcaatatgccctagctctggtttaaggtgtcaagggaaacgcggctcagtaaatagaggggaggcgtggcctggcatgagatgaatataatgcttaagatgattacattcagtaaaggaacgaagagcacgacatgacaaaggtggcacatatgacgataccccgttccttccgccaacataacgtcttttacctgaaattggccaggtttatggaagagcaaatcaaacattgttgttacatggcaaagaccagctttaccaagatctaaacgagtttatagatcccaatcaagatgacaagtattgcacccataaccttgaactacggaataccccgatagcatcttcatcaagtgaggaaacggaaacttcttcctattcatgtcagaccaggggctgtttaagaagagcgaatgacagtcccatgcactctttccgcatggttcagtagcgcggactttgactccaacttctcaccgcaaaaagagcactcatagtgcatgtcattcggaaacagcttgatatgctttttgatggagtgtcggctcagagatccagagggcttgtacatccacaagcgatcgctttgtggcagaccagggctaccaaggcaaatgaagcaagtcgttggtctttctgttggagatttaacgcaggccgaagaaatagccttcgaaaaagtatcgtcgctcttatctgaaagggttggattctgccttttaggcaggagggcggctggtggcatatcgacatcattggtagagcatttttgggtgacacaacgccgcgagggtgcaccctcttctgcatccataccgcaatcactgcatttatcgcagcaattcgacgctcatattctttctcatgcatcgtacccagcatcgtcagcacagtgtcaataagtatcctgtaagaaatttcatcgtgaagatatcggtgtacccacgaatataccaattgttggatcatgtctatcgtgggaaatacaacggcttcagcgctatattgctgtttaaataaagcgtttctttgaattcacgcactttcttgacaacttaaataaaccagctagaaagttgcgggactaacaagctttttcccgaagtacttccattgaaacaatctgcatcaagcccatataagacagaagacattggaaaatttcccgaaatttcgtttatgtccacacaaagtaggcggccagaggtatctgtggaaactttgaatgtgtgattggatatttcgcaagcgtgctcatatatcatcatgccttgaacgcggcacacttctatatccagatatggatcatgggacctgggtctttttctagtgcaggctcggcatatagtcgcaattaaatgagatgatggttctggctttgttttttgtagtgaaggaagtccaattgttcacggccttcatactcaatcaacaaggctgccggacacctgcggcactaaataagcatgtgaccacgtgtcaagtccagttgtccctttgcagataataagcagagttcgaaatgcatcaaccaaatttttgactcacatcatttaccctcatgaatgttgcgtcgtcagatggggcacttctgaccgttgtttcagactgtggtgtatcaaggacaaatccacttgagttttcgtcctcgtaggggccttctaataaatctttggactctgaaatccctgacccaatagcctcacttgattgaatagggtattcaacttcagtttcgatagcctcaggtgatccaacattattttcaacatgctcgggcccgggcttgggttcgggtgcgaagctggcaggtggtcttgcatcgcgcgaaaggcactttgaacaaatgtttctttcctcccatgattttaataactaaagatgggtgggtatatcttcactgatttgaagtgtaagaatctgcggaggtaatactataaattgtcgatcatggtattgctctgattttattactatgactcgttattagacatcttggctacgagtggtcatcaacgtgtttcttcaaaatcaataattgcgcgatcggatgtttgcatattgtacacgcttgacctcgctttgtaagacacattcaagagagaaacaaaaaaacatcgaatatttaaggaaggggtaggccaagagctggtaaaggtagactggagacagttccatgtattcttcgcgcatggttcaggagtcccgtttttgatatcagcctttccccgcaaatgttgcaatcacagtgcatgtcatttgggtacggcttgatatgtttgttgacgaagtgtcggctgagggacccggggttcttgtacattgtcaggcggttgcgttctgacgatctagtattaccaagacaaataaagcagatcgttggtctctctcctggagatttgacgcaaacagaagcgatcgccttagagaaagtatcaccactctcatctgaggggatagacgtctgcctcttaggcaggggggcagcaggtggcatatcggcagtatcggcagtgcgtttttgcgggacacgaggccgcgagggagcaccctcttccgcatcacagaccgcaatcactgcattgattgcagcaattcgacgctcatattctttctcgactgttgtacccggcagagtcagaacactgtcgataagtgtcatatgatgcggtgtcatatagccggtacgttgcaacgctcccataacttcttcgtcaacaatttttccggaaagttgccgctcactgtcgatcaccggctgttcatttttgtaccgctccagattttcacgaattaatcggtgcttttgccatcccttctcgtttcgtaattgcttcactgtgcgaccataccgctcgtctgcataatcaaatttctggcgtagctttttgacacctttctctttagccttccaccgcttgcggattgttcgggaatgagggccactctgcggtgggttatcgccgaactcctgctgtaatgcagcgtgcgcttcttcataggtgcgcttcgtagcatctcgaatttgctttctcgtctgttttctatcttccagggtacgcacacggggaatatcattgatacagctcgaatcctcaagccgatagggtctgcgaggatcaatcgatcgactcattgagcaggcaaaccgcatgagctgtttctgagcgggcatgccccgcacaattgcctgggcatctacgtggatacccacactatagtgccggacaaaagtatcaatgctggcgtgctgcagcatcacgttctgcaattcatttgatacatccgctggtagagaggaacgcattagccaaaaattcctatatgcacaatgtgtcactcacaactatcgttgaacgcttttgctgcgccatatcgaagacaatatggcttcgctacttccgcgaagcccgtaatctcaccacctcgtttcattctgtaacgcagccatgacccggtaagtcccttttcgagtgcgattcgaaggccatcagcctctcgtactgcttggcaaaacacattctgatcgagaatttcgtccttcagctttaattcctgctcaccaagtccatctaggacccgaagacggtacaatttctcgggacagtccatcacagggccgtcttttgatagacttttgaatgcgctaattctaaatagcatgcctagcaggaaaacatgaggactaaggaccaacgtgggatcaaagatgatctccggaatcgggaaggtgtttctgattgaaaatgataagcaaaagggcgatgagaagcagtggctggaggaaagacaagcataaggaatggcttagtgaggggatattcttacgactctttttcaccaagaaatgattttgtgaattccggtctcaagtagatgaaaagtcgaggatgtcctccatttggatcccgaaccagtgtcaacttgagatcctggaagcgaagtttcagtagcgccccgggacggctaccggtgatggcggccagctggcagaaaaggaggagttgtatccggtaccagccacaaggaaaagtcatctctgtcgtggataggatcactcgggcaaactcagccacatcctcgacatacatggtcgctttcggtcgacctttgagggaaagtttcttatctgaggcaactatcgcgagcacctatggaacgtcagtcgcggaccatttatgccgatatcgatactcaatcgagatctcacatcgcggatcttaacttggatatctttgctgagctcatgtccaacctcggccttgtagatcagatgccaccacttccagaataagtcgagcgagcttttggtcttcactccgggggtgcgacgtccatcctttccccgtcgctggtcacaccgccaagagaagagagccttgaggaagcgtaccgtctcgtctgtatcagagagccagaacaaacattccaccggaccgcgctttgtgccattacaaaatctagaacaatcagcgagcccagtaatagaagcgggatgttgcaatgatgtctcacctatcccaaaaatcttgcgtctcatccaatttctcctgagttttcgggctgtagcgtttctgtcggagctgggagacatcgagagactcggcctcctggagatagtattctggtggaagttgctcctcctcatcttccgaagccagctcatcttcgggctcatcttcagactcggattcggattcgctgctcgagtcgaagacgctaggtgcgatggaggaatcagggtcggaagcgttgttcgagaagatctcaggtaggcgtgagctagtgtcgctcttatcgtcagacaaagcaggccatggagaaggcatggcagcgggacacagtatgggattgaagaggggcagcgaatacacccgttggaaacccagacctggggctggaggggttgctggagagcgaggtaggactgtcggtcgggggccatggtggtcgatatttatggaaactcagggaagcagaacggtcaacagaggagccgaaaatggctcccctccgccagaaaattgactgagggtgaacgaggatggggccctacggcgacgaatggacatcggttaatcaatgggcccaggcaccaggcacgtccaacccgagcacaggtggcagtaaatggggttgtgcgtgggctttggtgcaagtgatgccaagaccgaccacggtgagcgagcggcttaaaacggcgtcaaaagcggccgtttttggcctcctgctcaccgtgtcatcgttaattggagtaataactgctattgctattattgatattttttttgtctgacttctaccttcttaggtttccttattaggtatcttagctattattttcttccttattagcttagaaagttcctatactagtagctttattagggtatctataatgttttttatttttaatgtgtcttaagtctaatgattccttctctaagtatatactgtaccttgatttttttctcttttctgtctttccgacggtatctgggcatactgttattgcttggtgctttgtccctttatctttatggagctatccatggtagtaattagatcatcattagtaacatcgtcggcaatatcttactcttgttgatcactccttttctccgtcatgtagacacctaggtatatcaacttttcaattgcgctaaaccggtaaaatcgaaaaagaaagagcaaagggggataatcagaacacgcgcaaaaaaaactttttcccccgagacaatactcgatgggtaaatcctgagacacgcgatcgctaatcatattcaacaaataatcgacgctttatccgtgcgagcagtatcgatccttgtcatcgaaatcccagtattgcgggacgcaatgggctcaagggtatcatcaccattcgcaagacgctcctctcgctcccattccaagcgctcagcctccttcatgatcttgagctcctgacagaacttgctgttcgctctgatgcggtcaccgtagcgaatgaaagcaaacggaattacagagacacccatactgaggaaggcaattagactgcaagcccaaggcacgccgagtcgattgaacatcggcttagcagcgagcggaagcaaggcacctagaatgcttcgtgtgcagcttgcggcggactgtgcgctagcggagagggtttcgtaggcgtcggtcaggtagttcagcatagccatgaaaattaacagatagcccattccgaaggggatgccggagaggaagggtacgacccagtgaatgtttggcgaggctgtccagcctatccagaagagggagatcacgtataggggtccgccgacgcaggcgagggggagtctgcggtattcctcgatgaaggcccagctggcgttgcgggccttcgctcgggctaggtagccatcgtaccagatgaagacgccacaggcaagcccggcgccgataccgactgttgtacagaaattagaatctacttcttttttgttggagaaatggcgtatggacgacaaacttactaggcagaaacatcaagccagatacaccagggctcattttgtagatacctgcagatttccgttagtgtttatgtccaacagggttctgcatacgctagcggggagaggtcgccgaccttggaagataattggatatgcctcaaagtagaggtagaagattgcgtatgccagagcaagatacaatgaactcagcgaaacgatatactcatgaataatcatgcggaatggtcgcgagatcgtgataagcagcatttctggcagattgcgactctggaggtccaatggcgatacgatgcttgaattgccggtatctttgcgtagcttgtgcgcacggcgcttcagaatgaccggggcataggtttcaggcatggcgataatcaatggcaaggtagcacccgagagaatgagtccgatccaaaaacaccaacgccagctgacaactgcaacgaagccagatacccaaggtccaatgattggcccaagggttgtacactgttaataaattagctgtcgagcccagaatctctagttggatgtatgcggcaagcttacagccatgaaataagccatcaggcgacctcgcagtgtgggatcgtcatgtacatcagcaaacaacccaccgacagtggcgataggcgccgacgcaaccatgccattgaatagtcggaatacaagcagagatgcatacgaatttgcgatagcgcacgctagcgtgaatatcatgaataagacaaaagagatgagcaaagggcccttccggccaaaatactcggagctaggaccccacagcaatggccctaaaatgtatccgacgagaaagacggagatgggcaagacgagagcggtttcgttggtgatgttgaactcttcggcaatttgggggatggcgttgctacaaatcgacgagccgatagtgctgttcatgacttgcatgacaccagctgagagaacaaggaacttcctcctctattaggcacatcagcaatcttttcttctccttgttttgtattggacaatatcccacataccgttctccagttgacggggttgtctgggtcattaagcccgaatgaaacaatcgttttggaagccactcggcggaatctagagtatgaagggttcccataacgttcttggatgggctcatgatcgacttctgagtcttggtcttcggagtcatgagagtcatgggagtcatgggagtgttgtgactcgtgagaggaagccactacgtgctctatacaacaatttcagcattttgaaattctaagatacaatgtagaaagcaccaacaaagagtataggcgactgacctcttgctgacatgaccttttgcacattttcctcgccagccacatggtccgacatcttgatggccttggcttatcaacaaagcgaaagtttggacgctaaatgaagatccaggcggattgcaagaattataaagagttcagaagttgaaaaagccacccccacagagtattagtggatgtttgactcagacaagtaaaaggtgtttaatgtgggttcaactccacattcatagagcaatctctgtggtacgccctaactttgacaaatcgagctgagacgcgagggtagtttagaaaatacagaaaagacaagccttccctgtcaaattaggtatttggtggtgttgatcagtagacctagatcgggtaggacggcttttctccaactgtttgggcaaaaaggcaggagccaagaagttgcggattgctaaagtggcaactagaattgtgactgtctgaaatatcaaattggacctcgcatagaagaccgattttcacacccttcacacgcgtcgcttgcgaaactacaaagggaatccaaacccacccatgtaaatcttgaagcaaatagctcgaccgcatgcgtctagtgatttggacattgaatcttctgtatgtaatgaagcgtgaagatcctgccgatcaattgattggtcttacattagcaattgcgtcagatagttttccctgtcaaggaagtgaggaccaatggggcaagctcgattttgggctgacgagcacttgttcccatgatatgcgtaatttgcatagacccgatcgagctacggctgatttttagtttgaagaagctccctgtagcggggacgccaatgctggggtcaacggggaacgggctattccgcacagcgtgggctcgacgtattttgttctcggagagaggttccgaaagcgctccacatagagtaaacgaacaatgccggttcaggggtatgccgtctttttcgatctgtgctgcgtatgccttgggcatcgaaggagtaatttcttgtgggttgggctgaggtcggcgaagttaaaagtgtcatttccggttgcgtgctgatgtgttcggcgacaaagccgatgtgccttgaccgcccaaaaatcatcagaagaagaatctggaagtgactcctgcagccaaaagcctctcgggtaatattctttcgaaagaaactgagtactgtgcatgagtggctgtcattattttgtcaaggggagtattggggttaatgcctgacgtaactgtcaccatattctgcctcaggcaccaaaccgttgtacacaggcgataaggcatcaccaggacccacaagtatccaagatttgtatagttattcacaggggagctaaatgtatgtaatatcatcgcttagatgcgtcttcgactttcaggaagcacaagtatctacagctgaccacaaggatattctgtcacataagctcttataggctgtatatgtcctcgttgctaaaatgaaaagactagttagtatttcaatgcctgatttctgaacataactgttcttgatgtatgaaatttacaaaggccgattgattcgattcctcccctccgcttgagaattaacccagacactgacactcatgctggccactgagaaaactccatagccgcagttattaatgagtaccgtctcattttgccagccaagaatatctgtccacaactccccggcatgtctgtgaccaacaaacatgcgcttggaggatgcgccaccgttgctaaggatacaggcaagactgaacgggtgtttatagttctcgtagcgcacgaatcctgtataatcgtaagaacaagcaatctacatccaaaaaagtgatactgaccaatgcagttccgtctattgaagtagtcccgttgtttcccgtgtgcatataactttcgcgcacgcgtgagtatgggaagcatttcgccgcatgtcccaggaggcttggatccacaattgattccatagaagtctccgtagaaaatgcatggctgcccttggcttcggaggaggattaaagagtatgcaagaggtttgaaaaatggtgcaatgatagtctgctggggtatttagttactatccacgccctaggatgtataatgctaaagctttggtctatctcacctctaatgaatgtccatcctgctagaggattgtaagctccatcatatcctcacaggacttcaacataccgtgtcatgatttccaacaaaagtctgacgtggtagtgatggttagtgggagtcctttctaccaaaataattgggtcttactactgcatgcgacggcatctgttctaccaacgtgcctttgaaaatattccgtagatcaccgcctgcgatcttcgagatagctgcaaactggcccaaaagtggcacatcgaacaacgagaccccataatccattaacttgagataccccagaagtagacccacctctcctctccagtactccgaaactaagaaataatcagcgccaacagtattgcgcaaatgtgtcaaattctttttggaaagacgcggaataatgctttactgcgtcgattcgcattccactggttggtaattcagtgccaatccactccccatttcattatatcagctcgaacttccgggtgggaatggtcgagatcggcgaacattaggtagtcgtagtttccatgctcatcactcacgtccttcgcccagtctttgttctgtcccagtatcttgtatattgcattctgctggctcgcatcgtcccagtccacaccagtaaagtgttgccagtgatacttcatggagctgtatttctccccacgtcccggaaagtcaaacccaacccaaccatcgatagtcagcggtcgagatatttcaatgttccgatctgcaagattgttgacctccatacgcgctctcatcttccatttgtcagcaggaatagaaatcaccttctgggtccatcttgacgactaagagattctcggttgaatctgccccagccttctggtttaaaacagcatcccagtaaatcccaatatccatatcctttgcagcccataccaatctctggaggtcctcctttggaccccatcgcgttgctctggtgcccttctggtcgaattccccaagatcatatagatcgtaaatatcatacccaattccagatgggtccatccctttacacccgggaggaatccagatattatcaactccgatgtctttcagatcggggattgccttgcggaggcgctgccaatggcgttgatcggctggcacgtgccattcaaacccctgcatcataagtgtgttttctgggggataccatagctgctttttatcaagtccgacaaaagagactggagaaccttcgatccctctccacttcttaggccttctccgaatcttcaaaaagcagcttaggaatgacagcatttgaccgagacttgcctctattgctgaaagtatggtattgatgtaatttggcctggttcttctccgcagcgtagggagaaggacaagaacatctagcaatcctcgactatatcatgttccccaaaagtcagggctgggcgaaactgacgagtgacactgacacaccctgctgtgcgatatacgttggctggtagaaattgaaacgcttactcgttgggttgaacgtcaaacgccgctctgtggaagatcacattaatgtttaaaccaacctcttcctcttcctggttcgtcggagtcttcttatggcacatttcaactatcctagtcttagaatatccacgccaatgtttaatgcgatgaatcagtgttatgcatagttgacgtgtagctacaatagatatatacaacatactgggtagggcaaggaagatatcggatcatgggaaccaggagtggcggtctgagagtaatgaagcgcctaaagcgcccaaccgtggaaggtgcaagattggagctcagaataaatgtcttggcggtgttgcgataacagtcacaaatggtcaatacgcgtgtccacagtggagatgtggctcgtgcgaggcaacaacgtgggggtcacctttgcggccaaccgacccttttcattattttatgcattcacagtcgtggagatcttgttctattgataaagctgtggatgctccatgtttcacgtctcacttctcaatttcctccatcatccgcttcgcgtcccatgctgccgttctctcttcttctccagtctcctccagctcgatcgtagccaactccccaaatctttccttccagaactgccacctctccttagaaaacccacattggcctttccagagcgggcctcctttacccagagcgccatcaaacccttcattccactggtagatgtctgccccgagaatactgatccacgcagcggcagcccgaatcaatgcttctactttccccggagagtattcgtgtgctggtgtttccagtgcctcgcgcagggtaatcaatgcaaaccaggagtatgcaaagacaggttctttggttgccatcaagcgtgccgtgaatttatcccggttgataatttgcgaaattgctttttgacgggcgtcaggaggtccatcaggtacgcctgcattccactcgtcccggaattgccagcctagcatgggtaggtctttccagacttgcatatcgtagagcacaatggagtccccatttgatttctttgcgtttgggagttttgatagttgaactagcacattgaccagtttatcgtggtgctcggggaaattgtatgcacacttgaagatcaagctccataggctggtaattcccccctcgaggtctgattcatctgccaaggagattgaagccagatgttcagcggcgtgctgtgcagatacactgtcgctgaataggtcttgtaggatagcaagccgagaggcaaaaatatcatctgtgatggcgaccattttgggagatggatcagaaatatgttttcgtatatgatgaaggggagtagtgatgttttaatattctgtttcaaattcgaggggctaattgtctcttatcatctgtgaatatggcctcgtggcctttatctgctgatctcattggttctgatttccaaggttgcatagcttttgacctatagtgctagttgataacctgagcacgctaatccaaggtcctacagtggggtttaaggccatcacaacatacggctttgaagtgccttgatttttttagaaataatttatgctgtcatacttgtatatacttcacagctcttactttgtatccaatcaatatttcacataccttcaatcatagttcagatagcatattaaaatgtgattatatcataacttacagaacaataattctccatgtacccatataactcatagctccaattgtatactccaatggccgcaatggccgcaaatatccaccctgacatgtcagctaatacgtgtccacagtgacgtagagggctgtggctggtaacaacattgaatcttccacctctgatagcgcaatgagttcgatatatgtacggagtagcatacagtgcaatatgcgctatacaaacagttcaattccatcaccacgagccttgaataaattcaatgtccagagccagcttggaaatgtgcctcctatcaaatccctttgcggttccttatcccgcctattcccggcaacgagctccaaccaccaaaatccacgtctaataatagccaatatcaacctcaagttggggtttgatgataatcaggatcaatataacaacatgcataacattcacccatccatgtagaaaagattagcaagacgctatacggttgaccgggcgatcggagttgagtgtgtggctgccgagcggctaccgcattggccgcgaaaagttttcgggttcggcggtcccatccctttgaaatcctttcttcttctcttcctctctctaaggcttcaattgaccattccatcctctcctctctttgacgttattctttacgttatctcacattaatcaaaatggctgtccctgtcgcccccaaggaggagatgagcgctctcaacctcgtatgttgcgaaccctgaaaataccaagctttaactgacccgattcttgcttccagtactcccgcttcgctttcgctggtgccgtctgctgcgctgtcacccacggtgctgccactcctctcgatgtgtaagtttttgaatctgtcgccggcgcgcgaagaagaatttccgctcatttccggtcctttacagcgtcaagacccgtatccagcttgaccccgtcacctacaaccgtggtatgctcggtggcttcaagcaggtcgtccagaacgagggtgctggcgctctcctgactggattcggtcccaccgccgccggttacttcctccagggtgccttcaagttcggtggatacgagttcttcaagcagcagtccatcaacgccgtcggctacgagactgccaagaacaaccgcaccgccgtctacctcgcctctgccggtgccgctgagttcattgctgatatcgctctgtgccctctcgaggctacccgtatccgtcttgtctcccagcctaccttcgccagcggtcttctccctgccatgacccgcatcctcaaggaggagggtatcggtgccttctactctggattcggacctatcctgttcaagcagtaagtttttttccctctgcccgcttcgggtatatatccgatgtaaatcccactaactcgatttcccacagggtcccctacaccatggccaagttcgtcgtcttcgagaaggtctccgaggccgtcctctcccgcgtcaacaaggagactctctccgacggtgccaagaccggtatcaacctcggctccggtctcgtcgctggtctcgccgccgccatcatctcccagcccgctgacaccatgctctccaagatcaacaagacccccggtgctcctggtgagggtaccgttacccgtctgatcaagatcgccaaggagctcggtatccgtggctcttacggtggtattggtgcccgtctcttcatggtcggctccatcaccgccggtcagttcgccatctacggtgacatcaagcgtatgctcggtgccactggcggtgttgagatcggtaaatagacgattcgagtctaatatgctcgggaggattgtagagactacccttagaattccttttgttttacgccttgtccatcccccacacacgatgtacaatattttgtctcagtttcctttcaagaacaagctcgcttttgttatatttacaataatttccatttcctcgtgaagtaaaagccttggtagtgataattgggttattgacgtctcgattgcgaaccgattggatttcaagaggccgattgagagatggcggaagtttgcgccgagactagcaatgagaattcagcgcgccatataagatttccctacggtcaatttcaaccgcctgttcactgcgctgagctattgacctccccggtgtgaccccgaaggaagggttcatttttgaatgagagctcggaaagtgcctgattagataacttcaacctctaggattgtccggatatagtatatatcccgaatctccttcttgataagatgtttcatacatatagatatcaagttgacggaggataagcagctccgactccagccgtgcggagggcagagcggggttgataagtatctccaacagtagatctataaattggtggacacccatttatcaaaagtgtaaactacctcattgcttccatctgaaacccacgcaactatgtcacaggaacaatacgagactttcaagcttggggattgggagctgcagagcggagagaagatcgaggatgctcatatcgcatacaagacattcggcgatccgaagtctccagctattgtctatccaacttggttttccggaggtatattcagatacgatcctttctctgccccaacactgctgatactgtctccagctctctccgataacttctggttgatcggagacgacaagctcctaaacccgaacaatttcttcatcatagtgccagccctattcggaaacggccagtcttcctctccatccaaccagccgagccctgggccattcccaaaggtgtcattttacgacaatgtgcgggcgcagtatgagcttgttaccaaacacctgggcatcaagcatttgcgcgccgttcttggctggtctatgggaggtgcccaggcattccagtgggcaacgcagtatcccgacttcatggatcttgtggttcccttttgcacggctgcgaaaacctcgctgcacaatcaggtctttctggaaggtgtcaagagctccttgattgcggtgaagaagagtcgatctgccgggtcgggagagattggccttaatagagagacggcggaagcgcattcttggacagctgaagagaaggatgttggcctcagggcattgggccgtgtgtatgctggatggtatgagattctgtgttgatttttgatttttatcccttatctgacacgttgaaaacaggggatttagccaggctttctatcgaggcaagttgtatgaaaccgtgttgggtttcaagggacttgaagacttcatggtcaacttctgggagaaatgggcttgttctaaaggttctgtttgatcccatcgaaccggttatatcggagaactgacaagtgctctacagaccctgaaaatctgttggttttgttgcagacctggcaaattggtgatgtctcgcagcaagatccatacaatggagactttgaaaaggcgatggcatctatcaacgcaaaagcgctggttttgccgtcaaaaaccgatctctacttcccgtgagttcatctcatatattctcccccttggtaaaagtgaggttaggctgagaattacatcatattaggcctgaggattcggagtacgaggttgcttgtatgaagccaggcattgggacactagatgtcttcccttcgatctggggtcgtgagtataccaatacaattacaagtagagaaggaactgacttgttttacagattgggcaggaggtccaggcgatagtgcgcaggatgttgaatggcttgataacaagctctctcaatttttcgcagagaacgaaggtggtagcgtgaattctctagccgggaagctccagaacacactttaataacaaagacacataatatgacatgttagcgttctgtcaatatggtttagtcatgaatgtgatctcttgaaatcgtaatgttctctcgtcgtcgccagaaaacagtagatatattgaccacgtgacgctgagtaagcgcctgccctggccctgcgaagcgccgatgaaccttgcgcagcgaccaacatccttcttcatttcatttctcttcgtttttctttcttttcttccggtttcgttcagagaattgtatttgttcccattgattgttctttttcattttcctagcagcatctaattccttcctgggctgcttacctcgggaaggctcgtcgaccttctccgctcgcgttatctaatcctccctattttcacacggcttgtgagactaaccttacaatctcgaattcctccccacaatggctacgccacctgtccgacagtggggtgttacacccccgatctcgaccgtcctgccgaccaaggacgagcttgcggcgaacgacgatctcatcgccgagctcaaggctcagaacaacttcgagctcccgactgaaacggaacggaggtgtgttcgcatctcaacaataaccgcaccagagctctggggctgacattgcggaatagaaaacaagtgctccagttactacagcgcgtcacagtggaattcgttcaagtcgtcagtcgcaagaagggtttgtctcctgctgctgttgaggcttctggcggtaaaattttcacgtatggaagttacagactgggtgtatacggaccaggtcagtgttcagctatgtatggatccaaactctcatgcccgtattaacgatggttgcttgcaggctccgatatcgatacactggtcgttggacctaagcatgtcctgattgatgatttcttcgctgaatttccccctattctccaaagaatggcttccgagggagccatcgaaaagatgacccctgtgcccgatgcgtttgttccaattatcaagcttgaattgtgtggaattagtatcgatctgatttttgcccgcctcgtcattcccgctatcccaatgaacctggatttgaagaataatgattacctcagaggactggatgaaagagaggtgcgatcgctaaatggaactcgtgtcacagatgaaatactggagctcgtccctcaacagaagacattccgtcttgcgttgcgtgcaatcaaactctgggcccagcgtaagcaccacttcctctctctgtaccgctattcaaattgtctaattatctttacaggacgagcgatttactcaaacattgtcggattccctggtggtgttgcatgggcgatgctggtggctcgagtttgtcaactatacccgcaagcaactggatctgttattgtggggaagtttttcagaatcatgaacaagtggaattggccccagcccgtcttattgaaacagatcgaggatggacctcttcagatcaaagtctggaacccaaaggtcagcacaaagcaccagtttcgctggcaatgtgggctaataacaacatcagatttatcatggtgatcgattccaccttatgcccatcatcactcctgcttatccctccatgtgcgcaacgcacaatatcagtatgtccaccaaggctgttattctcagagaactacagcgaggtggcgacatggtagacaagatcttcatgaagcagctctcgtggcaggatctattcacgcgccacacattcttcacccacgattacaaatactatctcagcatcaccgcttctagcaagaccaaggaggccgagtcggtgtggtcaggtctcgtggagtccaagctgcgtcacctcgttggcgctttggatcgaaagccaatagttgcagtggcccacccattcccgaagggatttgagagagttcatctcatcaagaacgagcaagagatggaagcagtcaagaatgggtctacacaatatcaggctaaaggcacaaagacggcgatgactgatgagactaaggatgctgctcaccaagccgcagtccagaataccctcgaaaatgcagaggttccaggaccggccgaggtcaaagtcgagggcacagtcgataatgatggcatgactgtctacacgacaacttattacatcggcctggagctgaaacctcttgagccaggtaatctcacccctgtccttgtatgacatttctaacttttttttttcttcaaaggccaatcgcgatctctggatatatcaaccgactcacagatcttcaagtcaacctgcacctcgtggccaggataccaggaagaagtcatggagttggctgtcacccatgttcgcaggtaagttcctctgtctgtgactcgtggatttttctaatgtcctctagctttgatttgcccgacgatgtcttccagcccggtgagacccgggcctctcgaccaaagaagaaagttaccaaacgctcagaaacggccggccaaaaacgcagcattggcgagttggacgtaagtgtatcgaagcgagtgagatcggcctaacctggcaaaccatcaaccttggaactcgtattccgacgccctgcgaaacaaaaccccggatgtcgacaataagaataactaataccaacttcgatttccagggtgcaaccgaaggacctgcgaaacgccaatttacctccgcaactcccgcctaaacaactccctgtatccccttcgcccctccatcccgccggggctggtccccaacaattgatatcagaaccacgaattgcttatggtctctgacctaatattgcagtttgaagttctacccatcaaccgaaccatctaactcctcgcatattcgaatgttacccttctctacagtgaacgtcccgtgctctcggagcataaggttggttcgttcttctcttctcttcgtcttttgtcttttgtcttttgcaacagctagactagacacccttcttctttctcgccctttggtgcctcacctcttactgggcatatttctcatggcgcatatgtgtatgggccggatttattcattatctcgtctatttggttggtgtagtatttcgttgtcggtggaatatgcggctttcctctgcccaggtgggcgtatccattcgccatcgtgcagatagttcaaatagtgaaatgcaaggacgtgtctcacaatatgtgggctacacataatccccaaactgtctacatcccagtaattttgctctcggctatttcccttcccttctggctctaacttgctggtattcaatcccgctactcttatgcgttcatttggcgcttcgctaaagtaattgagtgatattaccgttgatacagctaccattgaccactgctttatcttcccattggccattaggccatcttctaccggtatctggtaaagccatgctatatatggacgctcacagagtgcaagatatacagaatcttaatggaacatcttcgaagtcattccaagggagataaatgcattatagctttacgacaagaaaggtgtcattcgggaataataagtacaatggggagaaagaaaggagaacccatctacaacgagtgcatggttctgtgtggtgaaggaggaacttcctggaaggtgcggccaggaaagtacgaacagggcaggtgtgggcatgttcctcaattctcgccgcagcaagataaaagcaagacaaagcatggcatcgatttttgtgtgcctagagcatagatttcattttttgcccttttcaggcttgtcggctgagggtcgagtgcctgattttcttgtcgtacgcgtcttggttgcaggtcagtgtcaccgagcaaaaccaacactcggtctttgcatgctgttgctttcccacgtccaactcgtaggacacctatagcggggtttgctttaggtattgctgtggacattatcgccgacgttaagtcgcataggtcgaatgtagacgcgcaatgtattgtaccgcaatgccagggacacgatccagagagacatttcgcgtcggctgggtattttgcggcgtttggaggtgacatttaagctctgtcggctgcactccgacccttacaggtgtccattcttcgatgtcgcttatccgaattgctggctcgttttattccatctcggtatctgacggcagtgcgtacaaagctctcattccgaacctctctcccgtacttgctcatgttcattggggcttccatacttgaacatatccggagtgttaggcattttcgcaacgcatctatcccaggcaggagaaagactacacatgatgttcatagtctccatggataaacgtcacatgcggaagaaataaaaatgtgccacttttcattatgatcgtgacgagtcttttctcttgtggtagaaccagacccagacattcaagttttggcaagtcaccacgcaagttcatgttgggagggaaagtaggtattcaccaaattgtttgaacgccacaaagagaagtatgcccgagggtcacacacgacggcgccatacgggggccgactcctcgagccctgcgaacacaagacgagggacacagaggctttgaaacaggtgtttccaatagtcctccgactcgcgttgattgctcttgttccatctccaccatgctagagacaatttccccttcttccatcagcagtaagtgagtgttctggacatcaacagcatgacgcatcccacgactcccatatgtgatatagcgcttgatttatctcttgattttcctggcagacgtctccagtcgtcttcgccagtcagtttgaggcgaatagtccactccaccagaagctctcgtgttagagtcggtaaatatagccaatcgtctctcgggattgaaatgggtaattgtatttctattaatcgtccgaattcccttcttgacctcaatgattgcgaagattcttaccgtatcttggaccgcaaagctccgtccgcaagggtactttatgcttgtgaacttgcatataaagtgaatacggttgagtatccaattcaactttgggcgagtgaattgacagtgtttggagagaaggctttccgagtcatcgaagatatgctgtgttgtacttccgggacaatcgatgtatcactccgttaaaccccgtggagagggtgtaaaagagacgaatattttgagatggggattaaataggaagagggaagaacagaaaagagagagaacaggaaaacaaacgtgacctcaaaaatgcttcggtacgtaccttcccaatttggtctatacagtatacagtatatctgagaagagaaggaggagggaagaacagctgtgatattctcttcaataaatagcctatgggatcctagccaacaaagcaagacatcatcctcaaaattatttgctcaaactttcatatcctaagccctcttatagccatgatcgggctcactaggtagaagtttgatgtcgaagctgtggtgagaggtacagacgctactattttctcgattttctttagtcactgatgattctagattatattctacaatctctgaataaacttgaaggcattgctgtcccgatatcggcggcagacggtttaaaaatttgggaagccactgcgcgaatttatgaggagatgctgatggtaatcaaagtgagtgaagttgaggacattggggaattcgtaagagctcagatatgtttgaagaggacatttcaaggcctctctagttggatgaggaaaaaaaaagagatgctcacatgccgatttgaacgacagacctcgtgatggactagaaaagtactagtcacgcgctctaccaactgagctatgcgagctggttatgtgagcagggcggcggagggagaataacttcacacagtgttcaacttatcatctacattattacttctcgaggtcatatgataattattttggaaaaaggtgacaccagttaggtgatttccacctatatagtatgggactcatagtgattgagaaggtgattcctgtttgaaaggctatataatgaactgcgcgtaatatgaagcgtgggtggtgttagcgaaaatgcggatagtactgtagagggtggaaagtctaaggcggttgtgaaatggctgaaattgacgaactgttcttgtaagcatgcttgcccaggccacgagtgcgagaaaagctggacacttaaaggcaaagtttagagagatgttagcttaaaacgagtcatgacgctgagctaagtattgagcttggaagacgaaggtacgtgcaagtatggaatgttcaccgccttggcattaaccccttgttatagattgatctatggatctggaagccttcgtaccgccttttgatacgagtatactatatctttatcaagaaaggatatattataaacatcggataaactaatatctaaccagctcgcatagctcagttggtagagcgcgtgactagtacttttctagtccatcacgaggtctgtcgttcaaatcggcatgtgagcattttttgccttctccagctataaattttttacaatctgtaacggtgtctttttttttgctctctcccttcatttagccaatcttgataaccgcgaagtaaaacaagcgccaattggactgtgcacgggttagtaaattcatggctgctaccttttgagtaccgcgaggtctggaaaatgggaccttaacgtgcattgatgaatgtgtgtatatatgaggttattttagggttatgtctacgaaattttcatgcatgaggatgatttcgctcctccggactaaataaatccaattggccatctgatattgttcgaattgatctgatgcctaagagaatggactctgaaatcggcacgaaaaatgccgatgtagaatttttgagtgggtcctgccctaaaaaaatccgccgccccatatatcacagccagaccaaataaccatctaggccggctggcccaatggcaaggcgcttgactacgaatcattagatattagtttatccgatgtttataatatatcctttcttgataaagatatagtatactcgtatcaaaaggcggtacgaaggcttccagatccatagatcaatctataacaaggggttaatgccaaggcggtgaacattccatacttgcacgtaccttcgtcttccaagctcaatacttagctcagcgtcatgactcgttttaagctaacatctctctaaactttgcctttaagtgtccagcttttctcgcactcgtggcctgggcaagcatgcttacaagaacagttcgtcaatttcagccatttcacaaccgccttagactttccaccctctacagtactatccgcattttcgctaacaccacccacgcttcatattacgcgcagttcattatatagcctttcaaacaggaatcaccttctcaatcactatgagtcccatactatataggtggaaatcacctaactggtgtcacctttttccaaaataattatcatatgacctcgagaagtaataatgtagatgataagttgaacactgtgtgaagttattctccctccgccgccctgctcacataaccagctcgcatagctcagttggtagagcgcgtgactagtacttttctagtccatcacgaggtctgtcgttcaaatcggcatgtgagcattttttgccttctccagctataaattttttacaatctgtaacggtgtctttttttttgctctctcccttcatttagccaatcttgataaccgcgaagtaaaacaagcgccaattggactgtgcacgggttagtaaattcatggctgctaccttttgattannnnnnnnnnnnnnnnnnnnnnnnnnnnnnnnnnnnnnnnnnnnnnnnnnnnnnnnnnnnnnnnnnnnnnnnnnnnnnnnnnnnnnnnnnnnnnnnnnnnnnnnnnnnnnnnnnnnnnnnnnnnnnnnnnnnnnnnnnnnnnnnnnnnnnnnnnnnnnnnnnnnnnnnnnnnnnnnnnnnnnnnnnnnnnnnnnnnnnnnnnnnnnnnnnnnnnnnnnnnnnnnnnnnnnnnnnnnnnnnnnnnnnnnnnnnnnnnnnnnnnnnnnnnnnnnnnnnnnnnnnnnnnnnnnnnnnnnnnnnnnnnnnnnnnnnnnnnnnnnnnnnnnnnnnnnnnnnnnnnnnnnnnnnnnnnnnnnnnnnnnnnnnnnnnnnnnnnnnnnnnnnnnnnnnnnnnnnnnnnnnnnnnnnnnnnnnnnnnnnnnnnnnnnnnnnnnnnnnnnnnnnnnnnnnnnnnnnnnnnnnnnnnnnnnnnnnnnnnnnnnnnnnnnnnnnnnnnnnnnnnnnnnnnnnnnnnnnnnnnnnnnnnnnnnnnnnnnnnnnnnnnnnnnnnnnnnnnnnnggccggctggcccaatggcaaggcgcttgactacgaatcaagagattgcaggttcgatccctgcgtcggtcaatatttttgtcgttctgacgttctttttgctccattgttgtccagaatgtggccaaaaatggctgttgcactacatcgtacgatggtgtgtcgccgtatggttgagtggctcttagttttcagagtccacgggttgattgttgagttaccaagggagagtaagagtagaatttgaatattagaatttgatatatatttcagtatgtttacttcagatatgtgatatactaaattaaacgtaaatttgatactgcactacccggagcatgcaggttgatagtatgcttccctatagtagaacgtctagaaaacagtaaatcaaccacatggttagaatatcagactaaacatatgtcctgtcggtatacaaatgtctcatattggagccgagtggacatggcatgctaattttagcgttcgtttttagatgttggctaacgcataaccttgatttcattgtcctccaagttgttttaatgtttgtgataagtaaggcacgaaccgccttttatataccaggtgttaagcgggaccaaaccggcggtctttgtccaaagaaggtatgacttttattttaaaagtaaataataatggtcgcccgtcattgacatatttattggtaatagcagagctggtaagacatgatttcccactgatcagatttcacttgattgtttctcagtttgatctcactttcaagcaagcgatgtctcagtgattgatagaggcaggcttgctcatttataaatctataggagataatcgttagccaaggccactagcaatgagtgagagttccggatatcaacagcatgacgtataccattagagttcaaaaaccacctttgtatatactctcggagagcaattcttgattgagacatcccaacttcgactataagtgatggccacttactaacaagcgtagagtgagaatggacttcggaatcatactgatatccggttgctttgcgcagttgaacccggccacctctctagcactagtcgcccaccagcgccctgattgattcggtaaaccagcggcagacattgcatccccgaatgagtagtagagctggcaaacaacgcattcgtgctgcccgctaggcatgattattagtagtatgtttcgatcgtcaaagtaaatcgcactccactaatcctttcgcgaagaaggtgtttgcgtggggaaccgcccacgtcagctacggcttcagaggtaaaaggtattgagtttgatttgtttcttttggtccctctaagcattgattgtttgaggcttcttttgtcgaacgttcagtatcatcaggaatatgaaagtccgcttctgtaggttgaagctcgatgggggaatcgtgttcaattgtgatattagatgagttaaggcaaggcaagatgtagattcgaggagcagaggtgtttgcgttgctatctccgcctcaggggtacttttatggctatccatcacatggccgcttagttccatggatgtagtcttttatcttaaaggtatagagatagctcatatcgaaggttccctactaaagatattcggggatagtttgaaagccttagaaaagaccgatagaaagatgataatgaaatggttttataatagtgctagactttctctacagatgtacgaccgatctagatattatagtacaggacaaataaccgagggaaaaagttgaggctaggcctccacttatccaagcatatcagctttcaggacatctctcggcgtaaatattgtccagaaatgagacttttgccttttctcgttgtgctgaaacaatatccggactttttccgaattcatagggcactctgacctgacaacgaaatggcaggactaaatatttagctctattatgcatactggctatatgtagagattgatatagataaaaagtggatctggacaggacccctcgcgctccaccatctaactttgcaaaagaacaaacagaagattgtgcatctaataatctaggcaagtaaatctaaatgtaataagaaaatatataaaggaatgcaggtcaaaaacggctggtgcccacgcccttgaatcgacaagcccccacctttcagcaaaggataatcggtatctagaaatctcgggagcgcgttccgacctcgaggaactgctctataaaaccactgccggtccgcgtggaccagggagataaacttcctttaaacaaccatctaagtcccaaaagcttccccagctctaacacccacacccacaacatggaaattccacagcccctcgaggccccaggcccaatcagaccaataacctgcgtcgaaatgcacacagcaggcgagccaacgcgaatcatctgggatggaaccccgcctttgacaggtaccctgctggaacaacgagcgcaagcaaaagcccaattcgacgaattccgccgcgttctcatactcgagccgcgcggccactacgacatgtacggtgcgatcctacgcccggagaccgagctcgtcgcgtccggagaagcccatataggcgttctgttcatgcacagcgaagggttctcgactatgtgcggacatgcgacgatcgcgctgggccggttccttgtcgacgttgacgagaaggtatttcctcgtcggagggaattgaaatttgaccctgtgtcccggacgacgacgcttaatcttcatgtgccatgtggcgtggtcgaggttactgttcccacgttggattctgggaaatcggatgcgtcgcggcctgtttcgttcgtgtctgtgccgtcgtttgctactgctatttcctttcaggtccctgtgcctgagaagtatcgctgggctgagcttgctggcagggcttctgttacggcggactttgcttatgggggtgcgtactatggtatgattagtgctgaggaattgggcttccctggtggacttggggagattaagttgcaggatatggaccatgcgacaaagttgctcaaagaggctgtggttacgaatccagacttgcgatatctcatccaggatgttcggactgctgaggagggattcttgtacgggattatgatcactgatacgcgactgggacatgttagtgcttcagaggggacggcggctgctcgtgcgcagttagatgctagcagtgaggagacagggctctgtttctttgcgaaccagcagattgaccggtcacccactggaagctgtgtggctgcgagggtggctctcgcacatgccaaagggactttgccggcgggtgagaagaggatttataattccctggtgactcgtgcatacagaggtattcctggatttgttgggtctgtctttgatgatgctggcacaagtggaggagaccaacagagtgttcgagtctgtgtcgagggatatgcgtattataccggatatcattcctttgtggtagagaaggaggatggcctcggggtggatggattctctgtgagggacattgcactatagtggctatttgaagcagcgaattcaatatttgggtctgtgtttgtcttatttgaacttaaatagcggtgctttttgccgcctttgcccaccaaatagaataccatatataaagttagaaattcaagtttcattcttgatagtcaaatacttcatgcctaaactctctattgatctatttcatatagctaaggctctgggttgaaacataaccctaaaattgcggtctcgggatctccatggcttccgtggttcgaccatacgagataccacctagacgactgataggcttaagaaccttcaaatcgacaagattcctttcctcgttaatagcgtcatcccgaacccaaaaacgaacgccctcaatgatagcaagcacacccgatttcttaccgggggtgacccgactctcaaactccttcaactcaacaagcttgccctcgatagaaagaatggactccttgacacgagcaggctttacaacagaggtaggcgcctggtgcagccccgaaatctcccactcggagacaccataaggggcattgatagaagtcgagttggccgcttcaaggaaatgctcggagatgatattgataacacactccccagtctcattcaagttcctcaatgagtccttggctttctccatggacccagaaaagccaactgtgaacagcggcgggtcgtggttgatgacctgcgcgtagctgaatggggcgagattggtagtcttgccatctgcagactgcgtactgacgagtgcgatcggtcgcgggaccattcctgagatcaggaacttatagttggaggccacgggacggccctcttcattggggtcgatctcgacgtggtccttcttcagactcgcgccgtcgtcgttcgcgccatcgccttgcttccatgtggggtttggagacttggtgtatgtgatctcggcatcgcggcgaaaatctggccgcgaggcttgggttttctcgaaatcggggccgactttgagcattgtgcaggtgtggctgaagaattgagcggggtgattgggttgaaatggtgcgcggggtgttgcgagatcagcacttgagattataaatcagccatgcggttcagtatgggttgccccgcgaagtgttgacgatgagggtcacctccgtcatgctcgctagaaagtgagggcagtcaaatacttactacaattgcaagaatgagagcctccgagtatttcgggaggcagatttaagtagaaacatggggaatatggggcagctctttgattccaagaaattcttatcgcatttactatcaagcttcggctgcagcttagtgccacggatggggctgccgcggacttgtattgccacgcactatatcacttcctctaccgactatcgggccgactccggggatatcgccggggaacctttgcccctggagaaaaaccgagtcacgtcatgtgtacaaggtctgtttcaggattatgggtgaccgtaaagttgtgtattattacatgtatacaggacattcgaaaatttgcaagtattaatggcataaatcagcaaatgaatccatagtattggtattactgacctaaacccacaactgcgggattttgtttctttgatcctgaactgtccacaggaaatggccggctaaaagcaccgttcacctgaccttctagaaactgatgtggagcctgtcggtaaatactatattcttcggtctgttggggagatttccctgtttgagatctggaataagcttaaatctacttaaataaccttggaatgaacgatcaaccgtttcagataccgagtacctatacggagaatatatacacgtagtgttgctaaaagggtctatacttggaaacgtgggggagtgaaatacgggtccccagtccccaacccacttctccccataaaagctccatctgccccaaagcctggatcctcggagttgatgcgatgaatttcaatgttttgatcctattttagtcattcaagttcatgagcgtcaggcatattatattccgtcttcgctttattctttaaagatggtatttctaccccaaaaagtaaagtgattacagtataggtatataaaacacaagggatcgcctcgtcccatgaccgattgctcccgaacggggatggcgtggctatttccggcatagcggtcaaaggggggaaactgactccgatgttttcgaatcagaacattaccttacacaaatacatcgtgagatttccaaaagtttcggaaatgtaaactgtgctagaaagagtggcgtagtacaagcgaaggaaatcacgaggccttatcaactcccctcttccccaacttttctcccttgaacacttcacacatactttttgctcccctattagcctggaacattggccaccgttgatttcctcctaatgaagctttcgccatttgacaccttccctacttcatccgtccgatcctcgtcctccctgaaccttaggatccaagatccgcgccgagaatcccccgacgcgctcaagctgaagctgggagtgtgcaggtacccaatgggtcgaggccacggataattattggctcgccatgagcctcccttctcccaagaagaagaacggcggcattccttctgttcccagacaaatccgctttgttgccacagatgggcagccccaaaccaagcggcgccgcgttaatgccgcgtaagtgggcctcatatagttcacggacataacttcgaggaccaagacactgacgtcacttttgttttattcagttgcttaacatgtcgtcggcgcaagattcgatgttcaggtgaacaaccaggtaggatggacggggcgtctcgattgtggatatcttgctgacgggtatatgagggaagtatgtaagacttgctccgactacaagcatacctgcctcggatataccgagtcgaccgcacaccggcgaacgcagtccgactccgcatctcgagcgccgcccatttccgcaccgaatgaattgagccaacccgctgcccgggcagtcgaaagtagctcccccgaaccagtgtcaacaacgatagccaagccctctgcggataagccgaatgcgaaaccgcccggatcaaaggaagtttattcctgggatacttctgcgaacaaggacttggatacacaggctgttggggacagtccggcgagtggtcgtacctctgtgagctcggggggtcgtacacacgtcccgtattttcgatacttcggccctactgcgattgtaccggggtttaaacaaatggttgtgcaagtccgaggttctcgcaagagtaacccgtccacgtcctcagaatctctctctcctctcaggagccctaaactgtccgatattcacacaaaacccctggctactgccgcggataatcgggacagtcgcgatgcgaatatcccattttatgaccgagatgatgcacttccggtttcgaatattgtatcccatttgtgcgagctgttctttgcccacctcggttgcagctttcctttcctacagcgagagagatttctccaggacctcaaggagaagaaggtcgacaccatgttggtagatgcagtgtgctcgttagctgctagattctcaatacacccatcacttgatcctccacaggctcctcctatcgatcgttcgcagccgccactcgacgataaaaagtgggaccgtggcctgccatttggtcatcgcgcgatgagcggtctcgtggattcactgccatgtccaaccctttctgccgtccaagcctgcttattactcgcttatgaacaattcggatcaaatcacgacagtggactgtggatgtaccttggaatatccattcgcatggcacaggaccttggactgcagaagttgcaaggcctcaaacataattatggcaagaccggcgtcacaccgagtgaagtgatgacaggtcacgcggggaaactaagagaggaacagtatgatgatctggatgtgcatctgacacccaagactacctcacagactttggttgaggaacgtgcccgggagcgcgaacgggtagactcgttctggagcatctttttcctagacagagtcatctcttcgggtactgggaggccagtgacactgcgcgatgaggatattgaactctgtttccctcttcaatctgaatctcagctaccaaatgggtggcccgcgcctttcccaccacttattcggatcattcatctgtacggccgggtgaccgacctcattaatggcattcaggatgtcaacctcgtcacacctgatacgttgaagatgctggctgggatggaaagcgacctgaccggcatctatcaacacttgtcccccagacttcatttcaacgcagccaatttccaggcctatgtcaaagccaaggagggaactaatttcattcttctccatttttggttccatactctcatagttctccttcaccaaccgacgttgttgaactcatttggtggatcaatccaacatctctacccgaatagtcgtgagttgtcgatgtcatctgccaaaaccattgccgatatcttatccttctcggaacttgtcgatgggaaaagcttcattggcaatcctttcacgagtcagccgatgtacattgcggcgtgcgcattcctcatggaaagtgcttactatgcgtcctcatcctcgggagctgagtcgcaacaacctcagccactgttggcgaatcaatccagtgggttcgtgatgcccgctatagagtcatcgaacgggacagaacgaaagtctatggcgaagcatatcttgcttgcttctgccgccaaagagaactatcagcggtgttataaggccttgaaagcactcaatacatattgggaaggcactgggtatattttgacagtgctggatcagaaggccaaggggattgtcgaccctctcctttacgccgtggaggagatggaaattacccaaggtatcgcccctgggcaaccgcctgggccaggagcttggtgtgcgggcaatgcaccgacggattctgtctttgatccagaaagaccagccggggtcgcggatatctcatctgatgggaaatggtcaccacacattgacccaagtcaaggtttgtgagattcgttgatatttatgataaatatagcactaacaacttatatcttgacagctatcggatgggcactcacaggagcaacaaattcttcacagcccaacttgagtctactctatcagatgtccacgaccgaggccgagtcttcgcccaatagaccaacatactcgtcgcagtacagtcacagctacccagtcctaccgacgaatgccggcgaggggccaagctcttcatatgcgcaatctattgcacccgccaggactcacgaagaaatgacaccctcactcaagacaaatgctaaataccccaatgttcacgccagaacaactagcaccgacgcctcttattacatgggcatgaattcgacctatcccgaatcaaacatgcggacaacacgccccgtacagacaacacaatctacttttcccgggatgctcccccccgggctaccaacttcacatatggatacccaaccctccgcatataattactcgataccccaagcaacatccgatctccagccgggaatggacgatgccaacgggatgatgatcgggagtcatgaggtcgatatgaactccattaaccagcaagactctttgccgttcgttaacggcgagatccttccgtggttggaatacctccctcaagatgtcctcagtttcttcggcgaccatcaaaattatccgctcatgagtcctgacgatgtgtcacgacctccgtaatgttcttttcgtatatatttatctgcttgaggcgatttgcattcgcctttgttccagcgattagcttctgcttttgtttatatatttccgaccgagatgggggttttttggcgtcatgttggatgatatccttgccagcaatagatccctcttttggttgtgtatgttcaaaccggcatgtttgacttggaggagttgggttcaagtccatttccaatagactaaaaaaagtttctttgcaaattgatttctttgagatcctaacagacggtataaacccacgataaccttggaagttccacgttcaatacaacttacgatgtacgagtatattgtgtggcttgacgatcgacatgtcagtggttgcccggaacaacggggcggtgagcgactgtcaacatacgttggagtgtcttgaatttcgcgttcacacaaaggggaatatgtggaatttggttttaccaagtccctagattcttttgttatcacagacagcgctcgaaagtctcagaacgcatcctcccgccagccattacatgagaatctcatggcgcagttgaatgacgacagtcaacaaaacatcaattgcacagagatcctgagcccacaaccattcactcctccaagcaaaggcttccttatatcctccctcgagtccgagccctcccttgccgataatgcccagatgtcctcaacccaagaccatgaatacagctcctcctcgtcccgtcattcaacaagcgacgtcttcggccacgaaatggacgatgagctagaccaactgaaatccagagcctcgagtcgctcatcactagcttcgaccccagcctccgtcctcatccacccagtcgacagaacgaataaaatgccagagatggacatcaacgaaaagatagccggctacagaatggaggagtccgagttcggcgacttcaatgacagccccgctaacaaccgcaccatccgccagcgcgaagccgccttccgaaaaccgagttccgtccgggcgatgcaaatgcacacagaagatgaagccgatgacgatgattatataacgcccccgcgacgacgacaaggcctccggtcacggtcgcccggcccctccccattgagacgatcaccgtattactcgcccaatgcaccgaaacagccgaagcccaagagggaggctcccctcgtgctgctacactgcaccttgctcccgccgtccatcccagtacctggggcatcggacccgaggaaccaggatatcctcgaagaagagctaccggcgcaatactggaggcgctggcggcggctgcaagaccgggtgggatcgagcgtgctgcgcgatcgtggcgtgctgatctcgcacccggaggacctgtacgatatcctagaggagcggctgttggagagcctcgagctgaaacggccacgtcttcagaacgggcacttcgtgggacaggacgacaatgactctagctctggctccgatggggaattctcggatatcggagagagcgagacggacggcgagcagggggatgagtgtcccgactgtgggaagcatgtgcggcatggagatagtaatcgtaaatgggagattcaggtatttgccgcgaatggattgatgcgcgctggggcatgggctgctgcgtggcgcgatatggagaaggttgatgtcgaggtagggctttggttgccctctgatattcgcgataatttggagaggaggcttgcagagaagcagatggcagctgtggagcaggcgaatagtcagataccgcagatgtcgccgtcggttgatggtagacagcaggtcccaccggagtttttgcagtcgcctaggcatggccatgcccgcatggtcagtgatacggggtctttcacgacgtctgatgatatgactttcaggcaggctttcccggaagctggagctcgtctcgaccaaacgcctgaacttgggctggagaagaaggaacatgaacctgctctttcgaccctcctcatcaattacatccgtgttctggcggccgataagcgcaaccttgccctgcttgttctcagtgtccttgtggtttttcttgctatcggttcccgccagcaacaagtccacgtctactcccatttttcacaaggctcggctcatgagatcctgccctcctcggctgtgccgaatttgagcgcggctccatctcttattccttctgtttttataccgaattccgacttttcgacgtctgatatagtggagtctgcttctctgactgttgactctcttgatcctcatgcgcaggctccacttgaggaggatgaaaattcttcttctttgtctgatgtccccgttgagttttctgtgccgttcgagctcatggagcctacccggactacgcaacttccccttgggggcaacccagagactcctttggatgacactgtggactctactgctatgcctctagagtcctctccttcttccactgactctatcgagtctcccgttttgttagatgagactgcccagtctgataatcatggcgaagaagaagagctcgaaaaagacgaaaaaacagattgatccactttctcaaccttacgaccacgacaggaacgatatcaggcgatatgtttggcattttgatgatttttacaatgttcctctccattttgatgtcttttgctgatttagccatagccatagcccctcgttagttcagctttatgattctccttatattagcgaacctcatctggtttttcagatttataaattgtatgttcactcaatgatatcggccgtaaacgcttttttcaaatgatatgatccagttggatcgatagtagtagaagtctttctttggatatttttttctggatatcttttcctgggatgacataaaatgccttaaatctttttatgaaacaatgccaagtctagactttgatatctccactttgcccccaggtcctcccgctcgcttagtgatcgtccctctccaatagattagctatttgacagatattggatatcagatctgtggattatgcatagaacgtgtggagacaatgcacgaaaccttcaaactggttcttccatgtaacctgtgtccacatcttattctaaaggcgacctgtcctcacgatgcggggcaatctctacttgttacatcccacaatgtacaccagaaagcagaaagcagaaagcaaaatggaaaactgattcaaggctcgatattattgattatcgattaaaggtaaggttagttgaacgagttcgattttgtattgggcaggttcaagtgtcactggcccagcgaatttatccgtcaacccagcataagtcacaaccttcgtaaaaaagtgctaatcacgtccagaccttcgtaagcttcgtgacaggaacatctagtagccgccgccgtaaccaccttggccgccttgctggccaccgtagccgccctgaccaccaccgtaaccgccctgaccaccgccgtagccaccctggccaccaccgtagcctccgttgccgccaccacggtaaccgccgccgccgaagccgccgccgcgaccaccaccgccaccggcagcgcgctcagtagccttgtcaacacggatctggcgaccgtcgaacctgaaagaagtggttgttagtagatgttctgacgggaagtagatgtcgcgctggaacaggcgacgcccatgatgcgcgactgtcccaggacgacttgacttgaccagtcgcttaaagcggaggagaggagatatgggattagcttgcttactcctggttgttcatggcgttcatagcggcagtagcctcatcgtcggtggagtaacgaacgaaaccgaaaccacggctgcgaccagtatcacggtccttgacgacggtctagaaagaaaatggacattagagttgggcaatcagtgatggaagtcagagcgactcacagcatcctcaacaacgccgaattcctcgaagcgctggcgcagactgttgtcgtctgtgttccaggaaagaccgctagaaaatgagggtcagcaggcgcatgttatatcttcactagggtcagtcttacccaatgaaaagcttcgacattttgatggaaatggggtggagagagatcgagagagagggggaaagggtgttagtgtgaagaggggcacagccgagcctgatcttaaatacaacccgggacggaacaacatcaccccacagattcctgattcctggtttttcaggcgcgttttttattttgttttgttttgttttgattttgcgatttggcggtttgacgtgcgtttggcttggattatggcgtctgtgagacctgacttatgtatacttgtttgggtaatctgtttacctgtattgtcgctttgtcatacatagtggacccgtctccccacgctgtcaggagtctagattcctacactacttgcacctcatccaacagacgtatgcaacaatggcaccatttgaaataatatccagtgtggatgttgtagaacaagtgaccaagagcaaaagtaccgtatcgaaaactatatttagaatcctccttcctatgtgttctcgttatgaggtcataccatcccatctagatcaccccacccccggacgttctatataaaatcttctttctcctccacccaaccttgattctacaaccaacttacaactcatactctcaactcctcatctcaactcaatcatcaatatgcctgtcattgaaatcaccaggtaagtctctcccttacacaaacaaacacaaacacaaactaataccctacagcagagccgagttcctacaaaagatcctcggctcaccagaccccgtcgtcctcgactgctacgccgaatggtgctcacactgcaaagccatcgaaccgaaaattgaagaattgagcaacctctacaccccagtgaaattctaccaggtggatgtcgacaaaatcgaggatgttggccaggagctaggtgtgcgggctaagccgacattcatgctatttaaggacggagagaagattacagagattgttggggctcatttgcctgctgttgagcagggcattaaaactcatctcctttgagggcggttctttttttttatccaccgaggtgcttgtgcttgtgggatacatgcctccagtcatctgctaagctggtcttgttataatgttggcatgtcatcgatcagacagctgcttatccgatcatgttttaatggatacggctcttttatcaaagagggattctcaactatgttttattctagagtgcattcatacagatattgctcgaacattcggcatcccattatcccgtgtacaaccactcaatacactgtgcaacctacagcaaataccaaagtaaacatcacaccaaggcgtcagaaagcccacctatatacttccccaaatctatcccatatacctcatctagacactagaacccagcagcaatagaataattcgcagggataacaggccaagcatcaaccccatccaacatcgccaagaccatccccccactctgatgaacctgaatatgacaatgcaacaagaaagccccgggattaacaacatgatacctgatcgccgtccaactcaagcccgtgacagccggaagcgtatgaaaagtatcccgatactggggcgtctgcaaattaaagttaccaggaacagcctgtaccgcttccgcgaccgagccccaactaaaagtaccattcccctgaccgataatgaaatgcttattcgaatgcttgtggatcggatgcgggggctggaggatggtatccgtctgaagaatcaagtcgatccaggtattattcttcgttcggacgatcaagtcgccgggaatagagttctggttgaagagcaatggctgtgcttcctcgagctcgaggccgtagctggaattaccgagtctccagcggtaggcgacgccgacttggttgatgtgcaggaagaaggtttgtgcgatattgtttgacgggacgagcgctgggaacgggacgacgatggactcgttaaggaagacggtgtctgtcctggcggctgcgttgttgatttggatccacgggttggatggccgggttagctgcgacacgccttggtatcgcattattgccgtcgtgttcaggaactggtttatgctggcgctgaccatgcgcacggcgtagtctccggctggctgggtgagggggatcagaaccgagtatcggtttgagtttggaacggtgactgcgttgactttgagaggctcgatgtatcgtccgtctatggcgtatacccacatgtcgtgttcgtcgactgagaaggtgagctctagcaggccggctgtgctaatgagatcccagctcacgtattggttggctgcgttgacagtaaataattcttggggaccttgtgacggtacgcagccttcgaacatggttggggggatggcagcgtagttgtgtgggaagttgaacaccgtttcagtgatattaggagggaagcatctagtgatatagttagtctttgccgggatcatcaaagtactcattagacaaccactcacgccatatctgttagtttaagaccatcacccaaggacgttttctggacaggtgtcgtcagggcatcaatctcagcacgtggcagacaagtgatggaccctttgccattgatgagtaaagcattggcacagaatgcgtctgtgccagacgcaatctcagcagcccatatctcctccgacgtgaggacacgccattcagaaagcaaaacgggagaggtcacgatctccgcacggatcatagccctcagctgagcgggatcggttgtgataagactgaagggcttttgcaccgaggctgcaggggtgatatagatcggtccgtaaaggccgtcttcgagagagccgcggtgatgggcatgataccagtaggctccgtactcggttgcagtccatttatacaggaatgaggtgttcggtgtgatggatctctgagagacacccgggactccatcagaccaaggagttcccagctgttcaattcctatagaattcattagtatggatatgcaaatcagctcaagccatcgaagagcttaccatggaagtgtatagttgtattgaacgggcaccggttatcaacgaggaactcaacattgtccccctggttgatccgcagcgggggaccaggaaactgcccgtttgtcaaaatcacttgcctagacactcctgcgacagttctgttagaccatgtcaaggtaactggaaagaaaactgtagccgcatgtgtccattggacgaggcacagagcccaaagggacaggctgaacttcatatctaaagataacactagactgaaaatcactatcagatcgaacctgctcttgatgtcccatgctttttatgggattcccacccttttatgccggcccagggagagtcatggagcattgagtgagcatatgcatctcgcagctcttatgtgggtctatcacatcagatgcaggattctcatgggcgagtcttcttgcgagctcgtataggcgcaaataaatggaataagccatctacttctgtcgggaactaatctaacttctcggggaataggcgggggcgaagttcatccgagaattagtagattgatcttgggtcttgaagcctgtttcgcagctaagccaatgactaaaggctaaattaggtcgcaatcttcgatctgaagcaagggacgcgattgggaacagcaggctgactcctggcgaatgaaggactcaaagttcaagataccccggtagtcccaaacaatagcttggcggtgctgcagggatgaatctgtaatgaaggtgttggcactgcttgtgtgtaagcatagccctaagcgggcagattcaagacaggaatcctttgggatttggcacgttgctgatgtggtgtatccgggatgaatggcgcatgctgggcacaaagtttccacagccgtgggagagtctgacttggggtcagagttccggtaacctacatgttacacggatgagaatgaatatcactagtctgatcaaagaactgccggtctcggtcgtcatcgtactatgattcaaccagtcataaatcagctttcatcgaaaaagagtcggtgtaatcctcatcccgacttaggagccacgtgctgaaactgaatcaaggtacgcaattttcaggatgaaacgaaagccttaggtgagggaggttatagaaggaagatgggggcagttggattccaaactgaaccacccgccacaaaggtgacgtgtggaagctgcctggatgcagctgagatctaaaacaggagaaggaaatggaaaacgccaattgatttgtgatattcgaaaacatgattaatatccaagtcatatgctatcaacaaggaagattgtaacaattttgtgaagttaacttttcttgccatgtatgatacggcatgggggaagtaaatagccgccaaagacattaatagttgccatcgacaaagtagcctggcatgtcatcatgggtgtcattcgatgcaggagggtggcccgctttggaattgaaaatagcaaccgggtttgaagcagacaactcactcccacgagacggggagatgggctgaccaagtgagcctttcgttgaccatccttgttcttcggaaattttttgaccatcggcgccatctagatgcaagccttccaaaccatcaggattgatttcactgtagctgtcgttcagtcgttgtaggaattctgggtcaaatcccatttgtaccaaagggtcagctgtgctttctcccagcacagacgcagtggttggaagactactagcccaatccgtggagaaggatggatcaggaccagctgacatcatccctgcactaccagcgtaactgcctgatatactccccggtcggctgggcccagcagaagaaaagccagtgccaggaaagccgtggctgcgaagactagggctagagactgccgggctgtggatggcggccccttggcatactgttcgcgctagcatattgatctcccggggtggagctcggaggccgccattgatagcgaatggaggctgcatgcctagatcggcaaattggatgctgtcgttgttcacaggagtctccaatccacagtcacgctttaggacacccagccaaacaatattatctgcgcaggtctggttccagggatcgtcacatccatagatgacgcgacgagcttccgcttgtatcatctgatctgacggaacatgaccttgtgccttttggtcatttatgtatgcagtgagtgcgcgagaaagccgatggtaacaattgatatccgtaggaacgggaagcataagtgtgctaccatcccctttagcatgctcagtgccccagggatcaggagaccgccattcgtagtcaatcatgtacggcggaatggcgttttcgacgcgagcttggatctgtgggtcaaagccccagtccccttgccattgagccatgctagctccatgtttgaaatgaccggccaaatggtctactcgatctttccatgtgtggaagagggaaccacagaatccacagcgggagttgatatctgtaatgctgctttgccatttctccatgcagggttggaacttggcattgtgcatcaagcggaggtgttggttgagatgatccttgcggtaaaatgtcctctcttgcactgtcttctcttggcaggtgacgaaactgtgagtttcaaggtgttcatcgtctggattagctgccaagcaaaagacacaaacaggtataccgtcctgttcaattgcaccgccgtgaggggagcatgtccatttgtccaagataagatgtatggacttctcgtgccgctgccagtcatacttagcagggaaggagtcggtacaaaaggtacactggaaaggacgagcagctttggcctttgaatgggccagagtattgacaggcaccgaggccttgcggcggcggcgacggtctttccggtccattgacccaaaggaaagagaagatcgatgggagaatgcagaagcaaaagagagatcagaaatggatgaatcaaaactactggcggaggcagcgcacagtttatgttcagagctagcatggcttgactcattgttactagaacgggccctcacgtgactcgatggagcctggcgtggacgggagggatcgaatgggggattggccagggcacgggtaatatcgctgatcgtagccggttcgttttcggggggagagtacttccaacgttcaaggggagtcatgagggatacgttgacggattgcttcatggggatgtccacagctcctggaacaggagaactgctcccaggcgacgcacgaactttgccgcgtcgcctggcattggcgagccaattggcgatttgcgtccgagtcagaccagtgtgttgtttcaggtcatccctctcttgctcggtaggatacgggttctcgtcgtgatctctcagccagcccttcaggatgctgattgccttgcgcgagaaccgagcaccagttttctgagagcgtgcatctgggtcattggaatgtgtattgtatgagactgatttgagggctttccttccggtcaagctgcctgtaggaacataggcattctctgacacgctatgtaatgtctggaggaacttgcccggcgttttggcgtgagtgaaactgcattcacgccaaagagagatacagcatgtacaaccatagttcattataccgcgctttgcaacaaaacaatccaatcccattcgtcggcagaagtcgcacggctcctgagcccggtcgacagggtcaatggcttgtccgacattcacttcggactgctccggtaccgggtcattggagaactccaatggccgatcatgaaccatcgagttgaaatttgctgcctgttcttcgggttcgtcgagttcaatatcaatcgaagcaacatcgtcgtctaattgattagagccatgggcagacgaggcgccctcgaaatcgaaatactccatgttgcgaacgattctaaagggaaatgctgcacaggggacagcctttcaggaccagagtaagggaacaataaagaacacggttcaaagcagaagaggagtcggtcagaagagaaaatagtacccttccaaggttcgtccggggtagagagatgagtgagtaatcaattctggtggagctccgtgaccttggaaccagaggtgggcaccattcacttggaccgctcaaaggcaaatcccgtgtggcttttttttttcacgataagcatgatggtcatgaggaataaggccgaaacacatgcttgggtatccacctcatatcgcaggctccgatgacaatacggagtggaagaaattaatttgagaggaaggaagtccacactgagtgggcggagaaaggcttcgggtggagaatccgagtgaaaaaggaccaaaatggatgcatcggcgcgccctttggatgacaacgctaagcctatttaggttaagctccgtcgagttggggtcgttgcccagccccggtgattcatctcttcgcgatatcggacgtcggctttcttttttatatctgtgttgtgtaaaaggtatactgtttctatagtagcagcgataataaaatagttcacgtggattattatagccgttagatccatgcagctttcctcatgtaaacaacggatcgtcttccaaaggtctgaagctagcttacaatacatgcacacctattggtttgaatttccttcggcgtcggagaagtcgaaacctgttgcctcatgtagatggtttctgtatattctctcgatgcatttggatatgccgccgtaaaatcaacttgtctccattcaagaccataaataccaaagaagatacaatgtgtgatacacgatgattgtacaaaagagaggaaaaagacggagaatgttgttttatatggggaaaatgataattgatggctctaggcagtgaacttggaagaagctgagaagtgacattatcggttttctattgcgctcgtattctagtatagtgacacatcgagccctccatttcaaaatgagagattcgatagattcaggtgtttttttcaatgatgagaacaaaatctaatatttagtagatgattgtttgtcatgactggtataggaagcggcataccttgacgtagatgatttcgcaatatatcgtatgtttcatcgtcgaactcagcctgaagcgatctcaatcttggtaaacgggaaatgattctgaacgcagtttctggcgcaatattccgatatacaacagtcctgatctcgagttcacaaattatatcgattggcggtagcgtgtccgcgttctccgcaagctcaagaaaagaatgttcatatctccgatggagtaagtcatcactcatccagtaaaacttgcattccatatcgcttcatccttccttcatcatcgggattcgctagccagtcactcggagactgagcacataggagtagataaatccgactcctatcttctggccactccttcaaagctccccagagggctgtcaacgcggctgtaaacacctggttgttctgaacggatcggtttcattttcacaagcggcgcgggctagaatatcgtattctggaagtgcaatattgaactcaaggcgtgtgacgttgacctgccgctgtctggattaacttgagggtgcatagcctaaaagaccgagtatgcgacggaaatccgggagtcgagaaggagtgagacatagaatagagaaggtttcccgctcgatgacagccagccatgtcttgcagacggttgcgtacaaggccaaactatcttcttttgggaggaaagaaaagattcgggtaagattttcggggggaagataaggagtcatgttggaaccgtatcaatctccagagggaattacgcgtgaacggtttgccacgcctctcttggaagaaattattcgaaggccggattcctgtttgtctgttgtttcatcagatgtagatcatatgagaagatgatgaatagaatggggtaggtaaccagaagccataaagtgcaagaactttgatactggaaccgaggaatcaaaggcatgttagatgatggcggtcaacaaagatgacttagatatacgggctacctagctaggcagcctgtttgtcagtctaatgaaggacgcggctgtctgcttctctccctactgattcttcatgtatgcgttgagccaaggctagcgtgtaaaaacgaatggtgcaggctctgaggatttgactgaattagcgagagatgcccatataaaatagatcaggctatacttgtatataacatctacagaagatgtataaagatctacaacttcccttttgggttaaagcatttggtggggccttttctccaaagataacagttttgaggggaaattgaacctcgtcagaatctggcaatgttctaaatttcgatgatcggtaattcaacgggtgtttcaatgtccgaatctcatttgaaccagagcatttatacctgaattgcccccaatttgattgagaaaacctccttctcgttatcttagaatgaagcagggaatcgactttcaagagcgcgatttgcctcacatcgcaccatctgagtcagaccgtgaccaataccccgaaggtggattgaaggcatggtctgtggttcttggggcttggtgtgccatgattccgtccatggggctcttaaacagcctgggagccctacaaccttggacaagtacccaccaactccgggattattcggagtcgagtattggctggatctatggaacctacacatttttcctcttcttggggggtgcacaatttggtaatcgtcttcccaccatattgaatgcaatctgaactaacgagcacctcaggcgcaattcttgattcccatggacctctatatgtggtgctcccgggctctattgggatagtactttcgttgattttcttgagcttcagtcatggtgtgttcccaatatctattcgtgtttctcccctatcgtattaccttcactgcgaattcacacatccctacgcaagaaacaaagtctgactctaaataagagtattatcaaatatttctgtcattcagcgttctcggcggaatatcagctggcacacttttcacacctccgctggcggctgttggccattggttcaatgttcgacgtggctgggcaactggggtagcctgcacagcgggaggcattgggggttgcatatttcccttgataattctttttgcagctcctcgcatcggttttgcgtgggcaattcgcataatcgcgctggtatgtgtagtgacatgctcaattgcatgtctcacggtccgcaccagactcccttccaagaaagcagtcacatccatcgacttcagggctctcaaagatatcaaatacgcatccgtcacgctgagtgtctttcttgctgaatttgcggcttttattccaatcacatacatcacgtcctacacacttcatgccggattcgatgaacagatgtcatatgcggttcttgtctttctgaatcttggtgctgtgttcggacgattcctcccgggactggtcgctgatcggttgggtcgatttaacgtcatgatcgtgagttgcttaatgtgttctctgttcactctcatcctttggctttccgaggatctggtcgaccccgacagcttgggaattgtcattggctacgctgtgcttttcggcttctggagtgggtcagctatcagtattgcaccagtttgcgtttctcaggtctgtgaaatccaagattatgggaagagagttggaactacatggacgatagtcagctttggtaccctcgtcgctatccctattgcaggcgctattcagcagcacaacaatggggagttctatgggctgattatttttgggggtgttctctatatttcctgcacaattgcgtttatcgtgtctcgtggcatttgcaagggatggggttgggggataagattttagacacggggaaattatatattggcctacgacatacccggcctacaatcatgtcttatggaaaagtcattttgaattagacattcttcattggagcggataatagattatattcagagataaatcaaattgattgaagtctttaggccttgaaatcgacaagaggaaagccagtttgtaatcgtaagctcttgaccttgtgtagtaacgaaatcattcagagacacatggcaacgagcctacagtatgatcacagcaatatttatcaacagccataataaactcatccttcgtcatctgaccacgatcgagacaggccttgagttcctcgaccttttcgacccttgtcatactcatccaggtctcgaagcttgtcacacacaaagtctttcacctctggtctaatttgcagctcactaacacgtttcatccaccactcgaaaccgataaattgccgccacttcatgtaaggaaagccgagtggattgaaaaacccactaaaaagaagcatatgaacccatatggctcctgaagtctcggaccatttaacatgctcggagagttccttgtattgactttttggccttttctcttcttcctttaccaaagcttcattaaatatgcgaagacaatcgaaataatgttctgtagccaccggggcgtggtcactgttttcgattttccactcatcattgaccggtcgatcatgaagaagccaccaaggagctgatccgaagagctgcgctggtcctgcataaacccactcaaggtccacgactctgacagttgtgagatcgctatcgcttttcatgatcatgtttgctggggtaaaatcgtcgcagatgaatctaaatgggccattatcatccgccgtgttgacaaattgtggtattaacgattccaaaatactcaatggagtatatttggattaaacgtctagttcggcaatggctgaatttggttgatgtcgaagtgaaagacatgctagtccagactaaaatgtcagaccgcctatttgagcagtacccttagacaatgaacacgacgtgaccccatacaaacagcatatcccgcccacaaaccctcacagtacgactcaatagccggcttccactatctcgcctcacaaatttcgacgccaaaggagagagcgtggaaaaatttacacaaaataagattaaaggaaggagaagggggctaggtagtcactacgagtcacaaggggtgcagacactgctgaagggctcgaatcgggatattcatctagactacaagatgcttatgagggaggtccggtcgaatggacagggagacattatcattatacaacagatgttgcgtatatgctgtgaagaagtcggggagaaccacggctgagacttgaccttgctttcgtccagtggatagtgcctggcacctggcatactgagacgagatatcgagttacgcacttactgattggttttcacgtcggaccaaaccatagaatggcagccgttggtcgattagctttcctttgtaatattaatatggtaacaagtcatttctttccaaagacgtattccatcggtgtaagtgtaagtctagcgacactattgaatgccctcactttacatttaccataggcttacctttaattgtaagatgtgcaatgccaagaatgtggtcagttaataactagtagcggctttaaattcagccccaaaactcctgtttgggtaaaatatcacatgtctgccacgtcatcagtgcttgattgataatacaatattgtacaaagtactttattgtaaaaagtacttttaacgatctctatctgtaattatttaatatacaacttagcatcaccaattctggatagctccaaacaagattatgccgatcgacaaatccaaaccctacatacccctagccggcggcgcagatgacggttggtctcacgagcaccaagcgacagctacatgctactgtggcgccatacaacttgcctttgtatgtatagcgcatactcaataccaaggatcgcgaatttaacattaacggggaactatagccaaccgacggtcccggcctagttgacacattcctttgccactgtacagactgccgcaaaatcactgcatcgatgttcgcatccaacttcatagttgcagactcccatctggtacacctgcgcggccgggaaaatcttaaatcctacagccagtctcgaacaatcgcttccggcaaaacaatgaccaacttcttctgttcaacatgtggttcgcttatgtatcgtgtcggcgaggcatacccgggacatagcattcttcgtattggaacggtggatgattttaacttacatgagactaagttgaggccgagggttgagcagtatacaaaggatcgggttgggtggttacatggtgtggagggttttgagcaggctagagggacggcttatggttcggatgtaaaagttggcttggatttggggcatacagataagacggacgttgtgtaacactgtaagaatgaaatccaaactccatcaaataagagtcatccgatacggtgtaagtcgaggcgtagaatcgcgttgagttctcgtctgcgtatgattattagtcatatcggtttctaaaggtacctaaatgtataccgcctttccacaccgctctatagttacagctcccgtattgaagctattcccaccatacaaatctctaaaataccccgtgtataggcgttgaggcctctcagaccattctcaacaatttcatatacatatcctcatctttgatcccacattttccccctacatctcacctggaaacattggtctcttgaaatctgcaaattgtctggtcttgaagagatggcatctgctaattaccctagactacaagtcagaacttcacgttgtatatttttggtagcaattccacatattatttgcctttttgaagcgtaatgatcatgatatctgcaccatccttttggtccggcgtgagaactcgattggcgtcatctttaatatcccagtatgatcccggtgatagagtttctgctggggtcaaactcgaagtcccttgtattggaacaagcaatagtcgctttgtggggttttcgattcttgcaggcacaatgaagtggaaaacggtgcagtcatagacctaaataataatcctttagaaattatgttgagaatggtaacaaggggatgtcgtcagacgtacttgataaccttgactttccatatccactttcatctctctgccctcagacagaagtcgatactgctacccaaaatgacactctttcatgcgatctggagtgttgctctggatgatgttcctcatcctcaccacgatctcgttcgcactgtcccatagctgttcgcccgccatcggtgccactcagacagacagtaacggaaggtgcggcaactttgcacggctttacaaccttgtaaagccaaaagatttaatgactcctgttattattgagagatcacgaggtccaaaggcggggctgtcataacaaggtgcccgaaaatcacatgataatctgtctaatccccaaaacgaatttgatatgacaataatccacacacctttggtacacagatgtggaaaatgtactattcaaattattggcaacgcgatgagaaaggggcacagtggatagcgagacaaagaagggtctagcgctgttgtacccataacactgaagacgagaacctgaaaaaaaggtgccatcttgtcatcgacgacgattgattggcaagtgcatcgctcctcaacgatcctttgccgctccactcgagtgggtcgaacccgcccttccggatgtttattttgataccaagagatagggcatctacttttgctcacattgtagcccatactaacccgaagaagtgctcataaaagtgacagggtgggaatttccctattcaatgcaaaaatcatctgttcagcaagtagaatcggttgtgtcgagataagtgagaaattgcatagagtttgcatagagtttgaataacgttcttgttgcattgttcccgatagctttagaagttcaaggccgaaaggcacctcttcggttcaaacatggatgcataaatttgaagaaatcaaattcatggatatgcttttgttgacttgtaagcgggtgtttgaaggccactgactatatgaccatagagataattctagggtggttttaggtagaaattgatgacaaggtttgtgttggtcaagcaggaacaaaactgttgtagcattagaacggcaaagcattctgtgatccgtggcgcactcgagaaattctggcagatcctccggatatgggccgatgaaaaatgaaccaattctagcaggcgttggttccgtctcaatgtctagattgagacaaaaattgaaaagtacaaacctttattaggcgcgacgaagataaagtgaaagctagcctatctgaaagaaacaagaatgaacatgggtctataacagctacgcgaagcgatgtaatatataagattagtgtcggtctgtaaagacgtaagtagatctacaagagcctgcaggcttcactgcgcatgaaaacgctttagtaaaaattcggccagattggcatatcgtccctggctcacatcttgctgagccagaatctgctcggccacatcatgcccccaaacaaactcggaatgaaagttgcgcagttcggatagacgctgacggagccacctttgatgtgttatatcattggtttcaattaccgccatcaatagcggccagtgtaaacgcctgaggagctttggatcagataaaaattgtttttggcaaatgtcaatgatccctgctgtagcttgttggtgaatgcctagcggtaaagaatcgacacagagaagccggcggtggaaaaggacctggccgtagaaggtagaaacggccatgtatatggtgttaagcgtgcgtcgagcggaaacgctgccggcaaattttgcagtgataaaaaggtcagagaatttctggccacaatcagcatgtcactcgacatctagagggaggttatctatactgacttctcgtgtggcgaggatctcacggaaaaggggttctgtggagttggcggcaccagccgcggattcgacgaggaccttccaagtgcgatggcgtaggcaaaatccggcatgcaatagctctagagctctataattttcaatgtcgtctagaacttcctcctcgggatactgctcgccccagaagcatcggccccaaagacgagcacatcgataaaggtggtccggctgcaaagcgggattcccagactgggccacatagtcgttaagtgactcggtaagaccaatgggacgacagctagcatcgatatatctgttcatttgttagtcgtagtcgtttttttgttgaccgctggggatgaatcacagaatccataacaaaaactgctcgggaatgaaggagaccttggccatggtcacggtatcaccggtcaatgtgtcgactccgggagagaagaacatatcattaacatctttaattcgaaatagttgtggatgtgtttccagaagtgaacgcacgccctgcaggtggaattgaagctggattcccattagccgactaatagtgaacacagccaggacacaagattcttacatggcgtactgagtgtccgaactgccactcccatgctatcatcaagaatacagtggcaaaaaccgtctcgacatcttccaatgaaacctggcgcggcgtctcaagtaattgcctgaattctttaaccgcttggctgtaatggtactgaccatggtcctgagagcgcataagcagcccattgcgatgcatatcagatgcacttaacgccaatatcatccgcattattactctattcgatgcggccgggccttcgtagagatggctaattttgatcagttagccggttgaattttattgtaagccatttcgcacacgcatgaaagcctcaccataagccgctccaattccatctcttcatgtagtaaaatacgagtgaggaggaaggaaagtactggaaatattgttgatcgagagaggtgagtgtcaatgaattggcgcacgcgacattgacgttcaaggaagggtatatggggggcgaaattggcgctacgttgaatgtgtcaagacaaacgtccgatgtccaagagatcggcgagagacttgtggaaagggcatctggttggaactcgacaaggtcctcggctttaggtattgaagaggcttgttcggaggttccgggtgcaggttcaaggtgacgaattcgcgtgcttcgtccatgtttcactggtatcccccattcgcaatttaggcgcaaggatgagcatcttgcacaaactggtttctcctcaccgcatttgaccttgcgacggcggcaggtactacaacctagcaagaagtgggttagtcgcgatgtagatgaggtaaaagtaatgtcctaccactcttggaacgtggtccattacgcccaaaaccctgcatggacatgaaccagcagggatcaacctacagacatgagcgaaaagaccgaagagagcgaattgaaagaagtaataatgaaagggtgtcgggacattggaagaattcagtgccgaggccgataagataacgcggggaaggctgagtcatcatggcgttgctccgactatttcccttttcggatgtctatcgggaattcacgttcttatgccgactcttacgacttcaattcggtcgcaaatgatgaaacattaatacaccaaaaacttcgatagtgaaaaaataaatgggctttacaaccattggagtgctatgtactaaaaatgcatatactcctcccgcataatctcgtttttccattggcgccgcgccacatcatacatatcattctccacaatcatatcccaaccgatcaatgccagtgattttccaacaatcaatgcctcggcatgagcttcatctgttccagctgcagctgcaaacgtcggatgatgtggaaacgaagttggcggagccggaatcgcaaacattgtgtgaagcgtgggggtctcgtagcttacatttcctattatggaagtacatgggtcagctatatcaactaaaggttctatagggtttagataccaatgtcagacgacgctgttaggaccttgtcatggcgcttgagaacattgcgaccatactgtcccatgtgaacctggtagcgttcacagagagtatcattcaatcggacatcggtataaagttcatcccttgaagcaagcatgttagtgaccagttcatcaaatacggctaaatgggttcatactcatcaatcttgacttgacaaccggtggccaaggcaccggcctcaatgcaattacgcaatttaccgatgagagtattcaatcctttcaaggtagggctgcgtacttgccagaaagctttcgtataagccggtatcacgttgactaccttgggtgtatccaagaaagcacaatgaacacgttgatccggaagaagctgctgtcgaagaaccgcaacgttgttataagacgagaccagagcatcaagcgcgttgatcccttcccaagggtttccaccggcatgggcattcctgcccgtgaattcgcctagatatttatcagcatgggatacaaaaatcagaattggagcgactcacagtaaatattcttgcgggcattcatcgacgttccagctatgccatcagatggctcttggtcaggataaatctttttgggtccagggtgactgcaagtaaagtcagcacataatgttctaaaaatactaagatgtatcttacgccattagcgagatgtcaacattcttgtaagcgccggcatcaatcaatttggcctttccgcctccactttcctcagccggagtgcctaacagctgggttctaccagggataccaaatttctttatggcaaacgacagcgcaaggaacgcagcaatactgcttgtcgctatcagattgtgaccacaggcatggccaattccaggcaatgcgtcatattctgcgttgaaattgatcaaccgtccatcagttccactcaaaacctcaaaggaggtatctagaccataggcgtggcgagtaacactaaagccttgtccttcgaggaagtcacaaatcgtatcgtgggcgcggtgctcctggtaagcaagctctgggtttgaccagatctgggaatgatcaccaacatgttagccttgcagataaaatggtgaccgtagggactaacgtacttgataattcaattcccgcaattcctgctctagttccttgagcgaggcatccacagaagtcttcacttcctcgatattgatggtcgtaagagtcatagtgatttaactatatttttcaattcgagccgtgtaaaattggaatccgccttagaaaaaggttcagtgtataattcctgttgggatatgagcaactttcaacccggattgaaacttgatcaaatagtatccgggtggcgtttgccaatataagaggggaaggcgatgccgaacgatatgtcgcattgtcctatcgccaatgtgacaatggaggtagtagtcacgaaattacgcctatcatttgccacaaacttcgtagcctaattttacctaacactatgcctctttaccattttcgccgttgttgtctttgactctttatcgggggctgtatggaaagtgggttgccgatgaacatgggcatccacattgccgacgaggcaatatgattcgttggactgccgatatggtaatgccaatattttgcgcctcacgaagtctatccaaactctagtatctggctacaattaagacctacatggatcttatctcggcatccaaagccacatatagtcatctctgtttgccgtccagtcttcccgtgttcattgcgaacgatgtggtttccgtgtggtttccccgcctattcttgcagtaaaaccagctcttatcaacgtaatattgactggacagctcatgaaaatcattggtctggttccctatcagctattccggtatcttgtgagtcgccatcggcttggcctcactgccctgaagtcatatagccctctaggacgcccgcaaattggttaataaaatctgatatcaacaatatttcttcctcttttctcacctgccatctacctatcttcttctctactcatttagtttagtcagtatgggacaacaagacctcccatccgaaagtataaaaccagaccttggaattctcaaggttgagtcgatttctgctgctcgagatgtcgatcttggacagctgtttgaggttgaaacaacaccagaaatggagaagaaggttttgagaaagctagacttctttttgattcctcttatgggcggttgctacatgctgcagtacattgacaaactagccattagtcaggcgacccttttcaatcttcgacaggacttggtatttcccctttcaattcagtcttttttgtcttcgatactaatatgcttccttttcactagggcttgaaaggcaatgaatataactgggcatcagccatcttttattttggatatttcgcatggagttggccgagttcatatctggtcgtgaggtacgtttgagagatgatgcataataacatatactaattatgaatcctaggcttcctttgggcaaatatctcagttgtgctgtttgtgtttggggaggttgtgtgatgtgtcacgccgcttgcacaaactgggctggtttaatggcagcgagattcttcttaggcattggaggtaggagttcctctaccaataaattccaatttggctaatgagtgcattttgacagaggcatcgattgctcctggctttgcactgataacgggaatgttttatacaagagcggagcagccagcaagacaagcagcatggtttattggtaattctattgctgttctccttggtggactgattgcctacggcattggcaatatccacggcacggctgttgcccaatggcaactgttgtttcttgtcttaggcgccatcacttctctctatggcgtcctcttattctttacactaccggactcacccgcgaaggctgtctttcttaagccaaacgaacaagcgatcgccgtccacagaactttgaagaacaagactggagttttggacacgggaaagttccaatggggtcaggttttaatggcggtaaaagacctacaaacatggtttttggtgctttatacactgtgtgtcaacttctgcaatggtggcctcacaagtttttctgctatcattatcaccggatttggattcccccatttagaggctcttctcatccagatgcctattggtggcgcccagcttgtcttcctcatccttacttcgggcattgcctccctcgttccaaagtctcgcattattatgatgatggtcaatacttcagtgtcgatggtgggtatgattttaattttgaagctagatagtgataatcaagcagggaagatgaccggtctctgcctcggtggtgtcttcgctgccaatatcccgctgtcgctcagtttgattagttcgaatgtcgctggatttaccaagaagagcactgtcagtgccctcatgttcgcggcatattgcgttggaaatatcgttggaccccagttcttcatcccctcggaagaaccttcatatctggtcagtacttcactctcatgatctgtccttacccagaagtgctgacttgataagaccggtattaaagcatctatggctggactggcctttggaatcttcttcttggcctgtctctatctgttttatgtctcggaaaaccgtcgacgggataggctgtacgggtctcctgtggagatgaccgagaccgaagaactgcaagacgagctatctaacaaaaccgatcacgagatcgaaagttttcgatatgtgctttgagatatttcacttcgacatgaatttgtccggggatatgaagcacatttctgctgtcttcatgcgtcctgtgattttgctcttttgtatcccactgtgtgccagacgagcaagtattttccaacagggcccttggcaaagtcattagagaaatactagcgcgaaaagatcagcaggatctacattgacagaattgttatggatgggagtacttcgatcgatataaaaggtctctcgccttcgccgcaaatagagattacgagtacataaaaatataggatttgtttcctttgaattctgatataagggcccagagctagctaaacaataaaaagcaacatgacacagagcaataaccttttctcggtgtgaaatttctagccaaatgaacatatgcaaactcattttcctggtaggatggttgctccggaaggtggttatttgacgatttcgtatgttttcgctgctttccatttttcgaatgcaaatgcttccaagcctgcatggcttactgccacaaaccgggattgtagtcccggaactctccttctagaacgctcggtagacgaatctggcccttccaagagatgccaggatgccggtactcgctcccagacattagagactgtcgctccagtccaaaagttcactttagattgccagtcctggccagccaaatctatcttaaccaaaggccggaagtcttgaaaatcagaatgacgccatctgagccagcatattccatggcatgcttgaacgagtagttggtatagaaaccaggcctaaactcgtggtcaaaggtttttggagagatatgaagtgtgaggaatgcggccaggctagccactgcccggcgggataaacccttaaaaagaagattaccatcttcagggtatcttggtgagttctgggtggggttgttggaggattgctgtcagcagcgaagtcatctgacaacgaaggtgtggtatggtcaggtaatccagctggttggtggttctcggccaggcgggatacgttacgtgccaagtcgaactggaaagaaagagtgcattcagacaagatactaaacgtggagaaagaaaggaaagaagaacaggacgcagagctacagtgtcgtccttatatccccaggggcaaagccctatcctcgcttacttggtgaggaaggaacgagtccagcaagtgccaatcgtagaagcaagttgcaaagtgggaagcagcccattgatatagctgccactttacaaacaatgcgaacctcgaacctcctcgcttagctattcaacaaacaacctatttatcaagcagtaacaatgcgaacagtaagcgagcaagcaaatatgaagcatgtgatagcgatccatgtggatcgtgacactggtactgcaaagttcagtcatagatccaaactccctctgtaacatgacattcccttgattatcttcagcacattgcagactaatgtattaggaatttccattttcatttttatcaatgaccctatagctttagaaattcaagtttttgctccccatttaggaggtcagttacacaatttggtaaccgtccagaccgaagctccataacgattacagagatgcctaaggggaagttcaaagctatatttctgatatctataatacaataggcatggcctctatctataagggttctaattaagagatccccattcaactggcctgagtgtaaaccgtatcgtcggtgacagcttctgctggcagccacttcccggcaacggtgtttttgtacgtgagttgggcgagtgtaaaagtgtgaagctcggacaccagaaccgtcttcttcaggggcaagatgcggtgtaccatggcgttttgagtaagcatcgagatgtactcttcgtcggctacggatttcatcgaggcgtcaaaggtcacgcggatcaaggcatcgggcgagtctgtgctaagcagcgacgtagataagagccacaaggctgggccggccgcagtcgatgcatcggcaatgtgcagtaggccagcgttggtgccgagcagcgggtgcttgagcgtgaaaaactccattgtgccagaggctccaatgtggccgaaagtgccggtgccaccagtggcattgccagcgagagtgaaccacacaccactcaaaggaccggtagcggaaatcatcccgacggcgttgttgccgacgctgggcgggatgggcatctgattcgtctcgccgctggtagtattgatgcgcaggatggacgagtcattgtcttgtgtaacatagatcaaaccagtggacggttcctccttgataaacaccgggctgttgagtgcaggatacagtatgtagtccttggcattgtggatatccgcagagaacacatagtagttgccattttgctcggatgccaccttaagaccggcccagacgcggttgccgatctcaaacacacaatgcgggccgttacccggcgccgggatattaatagtcttcttgatgatcggtgcagtcgagagtttcttgccgggatccacaagcagtagcttgttttcgccctgcagtgacaaccacatcatgccggggtatatcgttgatggccacacgccatggagcatggaggtagtgctgttttttcccatggggaacgagtggtaagcaattggctcctcagtggttgcatccaactcgatcttgataagcttgctgtcagagatctgcgtcaacaagacgaaattcgagttcggcacatgtgcaaactcatgcgtctgagtggcgacaggcataagatactcggtgaggcgacggctcacaagcgaatgagaggaactctgtgccaacacggtgctggcgctgagcgccagcccgattacgagagacttgcaagcagagaaaaacatattcgaaatgccccgcttgacgttatcggggcttcaaatgttgatgtgttcgcacatgggaaaaagcactcatcttatattcactgcttccaaggttgtcagcttgtcagctcatcagcttggcagcttggcagctcagttttctcctccacatcttgcactagtgatttacatagtagttgaatagtctagcctactttataatttcttctctcctatcaatcaaccaattaaaaatcataatttcaccacaatgaggcaattcggaatctgcggtaaaattgggtagaaagccagcttaagtcgcccgcgagtactccgtaccttggaatgttgacttcagatcccaacctcgaagcggccgaccgaagaagttaaatgaccgtactattcattatgaacgccgagtatcttgctcgagtattccgtgggccttcattatgtgtggaataaagtcttggtgggcctggaattggctttattggtagtattttcattccgtccaagcttgcgggtacctgaaatctcttgcagcgccctacaaggtactcagtatagctcagaaaaatcacgcacaaccctttggctggtatatagccgtcttaccacccccatacctgtaccaggtatgggtctgtcccacataacgagagtttctcacaaaacgagagatttctctttttaagtatctttaatatggcatacccatacaaaaggtacatataccccatatcatgttctcaaccctttggctagttaaaggagaaataagagtataaatcaataataaatttatagttaaattaattggctaataaaagaagtttcagatatcttatatagaaaagtaaagaccatatttatgaaagagatgtatatagaaacatcaacgttctaccacttggagaatactcaatatttcatcctaatatattaatagtaaataaaatagacctcctttagactatatatcccctactatatcttttgtaagtattcctagaagtgacaaaatctctattttatgttcatgtaccttttgtatgggtataccatataaaagatactgtcaagaatgggccctaaacaagaaccttggtttttgttatggtctagtggtaaattacgctgtacgaaattcaacagatacctaaaaagagaaatctctcgttttgtgagaaactctcgttatgtgggacagacccaccctagttaactcagggtgggatggtaagacggctatatggcaagctgctactaagtatgtgctctagctggttacaagcttcgcaaattgaagggataacccatatacatcgccggttcagtataggcgatttgtttatatattgtaaaccgaaccatagtgaccgaacacaaggaatttaaggtaaaagctatccattagtggagttgttcctgaccctccaaatttcaggattggcttaccaactctgcaagaaaggtattgaaagggaataagagccggatgttgagaatgttcgacatgtaagtatcgtaaccgagagccactcattctccgcagtatagagtctctccaagtcaagaacataagcagttaccgagcagataatgctagagcatgccgtatgcacaacactcccaaaatggcaagcagtaatttatccgggaaggagcccttctcaaaagccttatgttctgattgggtttgtatagaaccacgcacgggtacacacaaagccaagtgcgctaagcccaaagggccaaaactaaactacattagtcctctgccacaggtccactttgcccttggctcatgtagccaataatatgtccttccttcatccaatatctgtaagtcgaggtgacggcggaaacaccacgaatgtgcgtggttttgcagtgcacgtctagcacagctacccgcctaacgacacggtatagatacagagtgaccttacccgattcggtttagcgtgactttccatgctctcatagtatggcgggtccatcatgagggaagtcggtgctataagagggaagtcggtgctataagagggaaggctcatatgttcaaccaggagtctatgcagtcgaatgcctgttcccttgattactattataaggcacgataggtagcacggcaaacaacaacacacatcaatgacacttgttttcagatcaaaggaatttagtgaatttcctcaaagacccgaacaatgaatgatttccccttgataaccaccttctcccctgggatcctccatgcgccaataccctctccatcaaacccatttttgattgatggtacgtcacctgcatcagggccgatgacatatttgtcctcccatccagaatcccactcttcccttctcgcactaacttcacccccggacctcttgagagaccaggcaccgctctcatccttctggccggaatgtgtctgggtctgctggagtgccaagtaggttccccagatccgtcccaagaagaccttggtcacagtcacctctttttgctcaccaacggccagaggagcatcatctgactccagaatccaggagattcctttcttcgctccttcaggaccctccttgaagggcagctcttgccaaacctcttcaaaagccgtcataggctcaccgggcagatccgcccgaggcatctctccgcactcgaggtcggtaccatcggcctggggactgaagttgccaatatccacgataccgatctcattcagggagtccaactcgcgcgtgaagagcaccttgactgtttcttgtcagtgaccttcaatcaaaaggtatttccgacaagtaatttcagggcaacgaacgtggaatttctttgggattctcctcaattctagtaccggccattgcccagtcaatggcgccggatttcttatccattcgcaaatccacgaaccattctcccacagaaagaacaatggtatcagtcgtctcctcaggaatttcaggaacccatcggagtgaaagacgggttgagaaaccgcaaattgatcctagttgagcacccgtggcagacattgtgtatgtgaagtggtttgtggtttgaatgttcacctggccagtctaattataatcaataatcttatcacaatcgccgaggcaggactcggtaagtaacaccagttgagtttcgcatctcaatctaactgtcgcctgaagttcctgcatcaatcaccccccccgctgccccagcttacgtaacccggatgttcgccgaatcggggattttgaagcgattcaacgattggcgatggagaacggtggggtgattcaactaatggtgttatctaatgcacttcgagttcattggaccgctgtcgttgtaagtgattgagccaataactgcattccaaagcataaatcggttatcaaaatgtctcgaagagtttcgggccattagcttccagcgaaatgtatcaatgatttgcgtttttgctatttagtatctgataaactagaggttctttactatcttctgtcaaatatagagccatctaagataagctcgattggcactccacaccaatatcaccatcaattccatcacaagtaatcactgatggggtacacttgccggacgaggtgccatgaatattctcgaactgaaattgacagcggatgggtactcggcgcaagtggtgctgttactgttgaagtaatattggtcaagaacaatgggaatgtcggaatttctaacgtggatgtccttagatgtgatattgtccgaagccgtcgggccaacctaggccttaagcgggctccggtctgtgtcatatcagcgagtgcattattgagaaatataattatatcttacctagctgttcaggatagtaacattctcgatccaggcgttcttaatgatatcctcgacgccagagtacttctaatacttcctatactcatgccgtcggtgttattgtaccgcggggttctacacgaaaatattggcatgtagtataagctttctacctagccggttggaaggattcaacaccccttaaagtttcttgctagcctgaaccagcccatagatacagctgatgttaccagaccaccaagctacggagcgcatgaagctcgcaggcttggttgtgatgtttgcgtagagaataccatacaccacacgcgaaatcgaataccaaacaccgatggtgttgatcgtctcgttgggaacaccggcaaacagtgaaatcaaaactgcattatgtaatcagtatttctgccgaggtccaggcacgaaaggggcaaaagcttaagcaaagagggggatcttactggccgccacaaacagggggtagccctcctgggcattcgcatgggccgcctcgcgacgcttcagcttattgagcgtgtcgcggctgattttgccagcctggaccgccgcctcgccgtaggtagtcaggtcctcgcggggacagacattgttgtcgatgccgaggcgcatcttcgcgccgcggttgctcataagacagaaggcccaaacccagtttgcgatgaggaagccggaggcgtggttggcggcagtttggccgggggcggcgcggaggccaattgtggtgaggagagcactgggttggttagcttcgttgtcggttcagcgcacgattagggtcactcacgacattgtgtgtggatttgtgttgttcgctcaagatgcggctgggggaggtcttataagcgtatgtgagagagcgagagcgagagaccgagggatgagatcatgtttgtcgatcggatccactttcagcagtcaggttgtgaagatgagatcacggctgtctgcacttttgattctgtgcttgtgcttgaaattgggttgttctgaacatggcatttgttctgacgtggcatggaactgacacatgtgaccacggatccatcgttcagcgcttgcaggatttacatcagcacatcgaaatttgttctagagatcacgctggccttggaaatctacccatgcctcgaaatgggcacaaactctttcgagagaagccccatcaaattgcgcaggatcatctataattggcgacaagtgtttggcccagatttgatcggcgttccatccccaagcctttctttcccccttggatctgcaagaaatcctttttttatataggcctcaatgtacctgatggcgtgagagaatgtggtattaggttcagccctgtgagtggttcgatagataacatatccacaatccgggagcggcgaagtctgctccgcagctcgccatggttgcgcgtgactggtctggccgaagtcgcgagaggagaagagatcgagtatatgaggagggaaagctccgagctccaacatgcctagagctagaggggctgatcccaagacggtccgagtcatgctcttaattcgagtgttgtgttgatataatcaattcactctgaaatcatgcagctgttgcattcaacaaatttttcaatccccagccagtccatgtaatcaacgcctgtcaacggtaaggttagattatggaaggtggagtatatcacctctgcttcattgttcatttagagatgatcagtcactgttgtttgacactccacggtacggacctacctccaagttggagcaattcttgcaattagtacaatttatcatgttggaactttgcttgcattgttcacaatccttgcagtcactgcaaaatgaacagtcggtcagagcacagacgaagccaagcagaaagggaaagcgggcggtacacagcgagaagttgaaggagcgatgacaaggacagagagccttgaactgaaagagtagaggctagagctaagagcgaatttgttgtacccatccgatataagattacgattgtgcgtggtataggactacatgattgtccctcataactagcccaaattgcgggcgaagacccactattttaagattttgacctgccacgccaccatcgactaaaggaacacacaggcctttttttccctcatttctagcgccaaaacattgggggcggcccccggtaagaagtacgaagtagagcccctcggctgcattgtggcctgccattggctaatatccgagtcttacctgcattgggaaatgatcaattggtattcaatcggcatgattgactcacaatatgtagaacccgtacaatttgatgcgaaatggggaacttcatctcagttgaatacttggcagctggtcttgaatgtatacctccccgaaactcatcttgacattggtatatcctatttttacgtccatggatactccgtagttaccgcccccacccgggcagtgcctacaatgcagtgatcggcgggggccattatttgcacataaaacagactagcttactagtctcgcatgccgcctttttaactcaccgtttgccaggaccgtaataactcatgttgtttccccatcgcaacacttctgccaggccgattccgccccgtatccctttacctttgattctaagctcgcgtcaatcgtgtcttaagcgcaatgtccgaggaatatgtaaagggatacgctattcgtcgaaatagcacatgcgagaccggcgaaaaccaatgtacgaaaaaagcgacatggggtgactaccaggcgtgttgtcctggaaattctttctgctttgattccgatactggaattcccaatatcatatgttgcgacaatcacaacaattgcacgcaagctatatccgtcgctccagcatgtgctgacaggagctggaatctattcgacgggaatggttctttctgctgtgatcaaggagagtcgggatttcgtgttgaaaatagagttttggttggttgctccgaggcaacatccccgggaaatgctagtttcatcaccttgccaacgatatcggtcggttagtttatcgcataccgacgacattcaatcaaaatgaccgattaacactttctcaggtaaatctgtcgcaagttcaacagcgacgtcttcatcatcgccctcttcatcatcgccctcatccccatcaacctcgaaagtagcatcaaacagctcgagtgcttcctcgtctaccaacgtaggcgcaatcgctggtggtgttgttggcggcgttgctggcgtagctgctatagctgccatcctctttttcttcgttcggcgccgcaagcaacaaaatacccagacactagcccaggcaccgtattcgcctccagtgtattcagaagtcggaaatggcctaccccgaaaagagcttgatggccaaacaaggtcagagatggatgatacccctcttcgcgaaccacaagagttgccgacaagccattgattatgaaatgatttctgctttcaataacagccctgattatatgataaagcacgcttgactgaacaggggctcggggtttttcaatgcattccatggatgatgaccctttagcgtttctgtactcttatcttagctcccggattttactcgagcatgaggccggaatgagaattgtggcctttgcgatcgtgacgacgaaagaacgctactgaaaaatttgactattatggtagtaatataaaatatactaagcgatggggaaatggatcggtgataccttacaagtcaaatacacaaagatatgactgactgggaagtgatacgctttcgcaggggggtgggtgaatctttataaggtagactgttgtatgagtggcactttttacaccgcctagccaacgccaaatcaagtctgcaacttcattgaaccgcccctgttgtagtctggacctgctccagagactctgcaagagacgtcaagcctagagtatcaggcaaattttctctcatcatcccggtggatttctcacagcgacaacatctaatcacgatgacccacgaattcgagtaggtaccccgcctgcagatctagaatatagaatatacccatactaataatttcagatgtccatatgctgttggtaatgtgatcaagattcacttgaagacaccagatggattggaggcaacagcagatgccaatatcattaaagtctttgagccgttcactctttcctctgtgatgcttattcggatggcctgctcatctttaagaatggaaggcggtatgattttgaagctctttgatcggcgatttgcagcgcagcttcgggaagacgaaaagattgggccctggatcccagatacagagactgagtaccgacaatttatctttgatggcggtgcatcagagtttgttactcagctcaacgacggtaaaacacctgaaggcagtacatggggtgtggctatggacgaaacttgtctttatgatcacatgtcagatctatacaagacagaggtccaggtatatagcaacctgaaggagattcaaggcaccgacataccaaaactccttgcatccgctattatgcctattccctacccaggtcaaacgagcagcgaatataccgatattcctgggatccttttgcaatatatcgaaggcttcccattgaccgatattgaggaatatacaccaagagaaagctggcaggccatctgtgaagacgccattcgagttatcaatcgtatcggtgatctgggaatacttaatgaggatgttaaaccaaggagcttcattgtgcgtgaggacgcggggaatagattcaaggtgaccatgatcgattttgcgctatgcaaattccgtcaagactataaagatgtctatgactgggataaatggaaatcgatacaggacgaagagggggcagtggggtatgtcatgcaaaggcgtttaaaaggtggattttcttaccgtcgatctgctcgatacgaaaagctagatgaggaattcagaaagggtgaatgagttgagactgtagggaaaatagaaatcaatatcaggccgaggaatatagcgtctgtatgtaacgttcaacctgacctggattcgaaacctcgactatgaggccttttagggaccatcacgacaatgggttttttgccaggcagaaaattaggtaataaaataataccgcctaactaactagccaggcgccaacacacggtatgtgttttcgacacgattaggtgcgaaggctaagtataagtaatattgatgcctgataatcccgaacacccttattctgccccctacaacgttggtggcgaaaggtaaaatctactgttcaatagttctgggatatcaatttgaataacaccccccaataagggttcttacctatgccgtgttgttgctttacccgtggcattctgttgctctgtcccagatgcaacctcgacgcctgtatttaaacaggagagcaagttgtggggataaggatcaaccatacacactactccagtacacaagtaccagtgctttctttatcaaagtatatagcattacgttcagcgcagagcaggcgatgtaaaaccatcatattttggtagccgcagatattatacatttctttattagcattaaaaaacaagaatgaaaaaagaaaagaaaaagaagaagaagccagcaaatccataccgccaaggctatcaccccaatttcccttccatctgccgactccagagtttgcggtcgaatcgttgttctagtagcgcctgcgcatcacccgcgtacatgaaaactctaccaccggtctccttgggctccttctcgtctttgaagtagacccagcagtctgcaacttcgtaggcattcgtctcataatatgatagcttctgggcctcttcttcggatcgcacgaggtacgcagatcccgtcaccacatccccttggttactattgatcagtgcaggataatcaccccatttcgcaacagcgtaaccaaacatctctgcctcgcgaagttgcggctcctccggcaggtcaaggatccttttcacctgggccggggcggtcagagttccgtagaagaagtaatacactggaaaggcagacgggaagtcgaccggctcgtcgcgctgcgcaaggtagtctggtggtgctgaccggagcatagtatagaaaggtgatagtggctcctccttggctgggaaaaggcccggaaaccgggttgcttcggaatcctctggattcatgaaggctgtatgatgtgaaagttggacaaaatgttgaagttagaaggctcggatacggaacaaaggaataagtgggtgctcaaagagaaaccagaagaggcagtaataataatagggttaaaactaaactacattagtcatctgccacaggtccactttgctcttggctcatgtagccaataatatgtccttccttcatccaatatccgatatggtgtaaaaggccgtgacggagaaatggccacgatatgccgttgtataaattcgaaaactcgtggtgttttcacataggcattattttaggccattaattgacactatactaatttggacactagcgcgaaaatcgatcagagggagggtcgtgcagcgcttctatcatcaatacgaatagaatataaatggctatgtctcctacagccctgaccgaaatatttctatatcaaacgcctaccaaagcgctttgtaaaatcgtcatggactgaaattagttcatccgaaagtcggatccgcaggttcaagcagatctttcgaaacccgcacgagatcaaatgcgagaggctcggaatgcctctcgaaggttatcaacccttcattcttcttatcggacggtggctgaccatctaatagatttacaagtcaccttaatccaccagatcacacctattggctgcaatccgagaacctcacattaagagtcattgaaggggttttccgctggtatcatgaaaactacagcttaggatatcaatccggctttctcaccatgactcgccccccccccccggcgagatagactagcattttggcaatcagggaccgagaaacaatttgttgagatacaaagtataaagaaatggagagcgttgattgattcgaagaagaggagagaagagagaaactgcaaaatacataaatatggatcgaaactatgtaaagggcacgggtgaggtagacgtgagacaccaccacaacagttttcggccccctggttgtgtcgctttccaaagtttgtcgcggcgcttattgcttgaaagcatgcggctaagggtttcctggctatgcgagacacctaaagctgccagatcctcgggtagagcgtgcaaaaggaactgaagatgaatttgaaaagaattactacttagaaaatccgctttaaccacctgggcaataaagaggtggcggtatttctatggcttgaattacgcataaggcaatagagctctagcagcgatctcgtagaacaaatgtgttacgcacacaacgtatgactataatcgggatagagggtataataaagctgggaaattattatagaagtatatacgtacacaccagggaagttagatcgatatcaccgcgttgaaagttcgtaaggtccttggcgggaggtctgcgaatgttctgacatattctgcacgctttgttcagactgagaggtctgttgggcgctttgcccgtattctgaggtttgtgttgaggttggtggaaacgcaatggcccgatcgtagtccaactcatggaacctgataggtttggtgtctggagcttccacgagcgccgtaggtattatcgagggaggaggttgttgcgaataccggtttgccgctgcactgtcctgactgggagtccgcttatatttttgacgatgggagataaaccaataagctgcagcaacggccgccaaagcagcaataccgcagcctgcgccaatgccagccttggcgccggttgagagaccaatgctaccggtcgaggtcgtcgtagtcgtcgaggtcgtcgaagtcgtcgagttggtcgtgggagaattcggggatgcaagtaccgtccaagagttttcccaagtaggttcccagctattcccagaggatgtgatggtggtgtcactatcgctgatatcgacaacattctgaatgtaagaatagtctggtccaggagcctgggctaagaaccaggatttcttggaccagttgacgccgacgaaagcagcctgtagaaaggcacgaccaagagctggagtggagtcggtgcccatgcatgggaagtattgtgtaggagtggtcaccaagggggcttccagagtaaggttcagaagagcgaaaggaaccttgatggtgatatcctcagtgttaacgtcattcttggtgaaggtgaaacctaggtagctgggggatgtcacaattttggtatattgcgaatcagttgtgtcccaaaagtagagacccagatcggaattatatgtgacaggcagattggcggcaatggcgtcgcacgaactttggggtagatagatatatgggcttgctgggtccactgctactgtgaagccggaggtcaaagaggaattgctttgtgccagcaatcccgtcatattagaggatttccagggcgaaccaccttttgcaaccccgatatatatgtcgattaattcaatcggaaacttcccactgtcgactggctgcgcagagacgtctccaaagactcgaccttggtcgtatcccctaagcttgagagaaccagatataccgaacgaggcagagccaatatgcataccatacgaataggacgggatttttcctttatcgtagagataactgttggcgaatgtggcattgatagggggcaatggggcgtctctggtgaatgtttggttgatgtacggacatcctagagaaaggacacccacttccaagggatagttcttcctaccgggatacgtctgatatccctctaagactgtagtcaaatctgcggactgcacaacagtgcctccaaggtccatggagtctagcgctcgagatgtcacggcgttgataggcactgcgttggtatatcccaattgcatgtctgaccattcacctgcatttgaatcatatatagatgtatcgttgtaagttgatgaatcgtggatgtcgaaaagaccagctgaatctgcgtaacagataggtgatatttttgtcgtgttgtcgcaaattgttaagaggagaaccgtgctcgcccaagatcctccgggatataacgcgatctttgtatcgttgccgctaatgcttacttcgacggcctgccagggaccatcaggtccaaatgacccagaagcctaggtcatgctccaaggagctacggcggcagcagagctatcgatatacaaactctaaagaagggttatggcccagagcaatggattctttatgccttattagagtgaagtgtcagccgaatctctatatcgctgcttaaatctgtcacgtggaatcaagccgaagtaaacaaagttggcttacctatagagttcaaagggaacgttggaatcagaggataggaaccacggttcgataacggttcgttcggcttttccagcggatacttcgagtaaacacgcgatattcactaaaaatagaatcagcacgacttgatgccagtgaaggaagaatactccgttgttaaacaggatattttctcagcaaccgccggggacggacgcatgtgaaaagccaggaagttgagggagattttggacggagcccactacggaccctttttggtattaactgttttaggtatgggttcagctggagattgattaaacacgtactaatgtacagtccactaagtacgagtatggagtacaataggggcagtaggcccgatccccttcccaccatacgaacaggtactagtagcacctgggcaaacatatacagaatccgatttgtcattgctaaacaaaatatggcattgggctgatacctgggtgcaatttcgtacactgtccgtcttgtaatacctgctaaatgaagatcgactcggtccattactcgataaagcatagcattgcacccatgactcgtagtcggcttgcctctacaaggggtaagaattgacaaattgcaggacgaaatacgagtataccagggtttgtgggctataataccaatagtgataagatccctatattttggaaggaaaaataatatatacccatagacctggtttctgttgtggacagaatttggtcaaaacgtgggaatcggaactggcagatctgtttgataataagcatggctttgttcaattgatgtatcttgaggccctaccctgcccgctgcccaggccttttccgctgcggattacgctgtcgtccagtaatggtgttttgcccctaatttgtaagaaattagtgcggtttgggaccaaatgtctcgctttggttacggagcagattcggggtctcctgtgcttaccccggcggttagcttgctgtcattttcaacctggctaggctgacaggtctaagacgaaggatttcttcactcacaccacgccataagtaaagatacgatattgatggctaatcgctagactttgcaagcgatcataccatgactgtaaccaaacccctacgcgctgtatttgtcctgatatctatcatattactggtgatctttcttcggattcgcggcagttttggctatcttaggccataggttaccatccaatttgggaaagaagttgactggactcgctttgcgtatatacaatatgtcaccaatactgagtatctgtgcaactcggttatgctatttgaggccctgcatcgtctcgatagcaagcccgaccgcttaatgatgtaccccgattatttttcggtcgctggtgacgataattcgagggaagcggaattactccgcatcgctcgggataaatataaagtcaagctcaagcctattcaagttcaaagcaggaacggcggtgaccgtaagtaatttttccctgcggtatacactatggtcgctttgccagtaccttccttgaagtgtccctcttagctaatatcaaccacagaaatatgggcagagagctatacgaagcttcttgctttcaatcaaatacaatacgacagggttttgagcctagactctgactctactatcctgcaagtctgtttatcacaatgttgtcttatcgttcctactaacctacctacaggctatagatgagctgtttctgctcctaccttgccctgtcgcaatgctacgagcctactggcttaatccagacgactgagtcctaagttcgcaattggttcttgtcgaaccgtctacgtttgaattcactcgcgttatgcaagcgattgccaatgcaagctctggcgactttgacatggaaatcgtcaacgatttgtacaaagacagcgctttcgtcctgccatactgtcgctacgatcttttgacaggagagttccgcggtaaagaacatgccggctaccttggaaacccgttggaagaatgggatccctatgctattcttaaagagaccaagtttctccatttctctgactggcctgtgcccaaggtttgtgctaggattccaaagtcgacccaagatgctaacctgtgtgaatgatagccatggatcgaagctcccaaagatattattgaggaaaagcagcctacctgtgatttcaaccctctgacccaacaggaagatgactgtcgcgctttgaacatttggttgggcatttacgacgactttaagatacgacgaaaggttcgtcatattagttcctctgtcacaactatcagaccgtgttgttttctaacgaaagaaatagaatgtatgtaaaaccagtgcagcggaagcgtaattaatccacgagatgtcttcactatctcagcatactgctactgcatacgttagatgggccagtgtattctcgcatcgttggatgctagacgtctatcgattttccctcttatttctccatcgcgatgtacatatgctgtttttatttgcgagccagtcatttgaagcatgcatttcaagccaaggtacgtattgtaaaagctgtaacgatactgttctggacatcatactgcatagtatcattgggtcatgcgccgtcccctttaatttaaaggagtatgtcgaatttcgtacagcgtaatttgccactagaccataacaaaaaccaaggtgcttgtttagggcctagaggggccatatcccattcttgacagagtacaatatgtacgtctgcctccgtagcagcctcccatgggttttcgacgatatgagcgtcaaccccccgaatatccattgaccaaatttagaagggttcaacatatgtgaaacatcctgccgccgattatgcacagtagccgggattgtcctgattcatcttttcattttaattaactgataattaaaaatttaataaagtgacattacgcatgaaccaaattatgcgaagcccttgatgaggtggaaactgccgatcttgtaccccaatgggatggatgtaaagatccgctggggttcggcccgcccgcaaatgcattggtaaagtttgtggttcgttacacttactgtacaggtatggtaagacaatttacagcatcacggaattgtacaggtaggcagtattcgtgacatattgcgtgtaagcagattgagactaatttaatgcgtcaacggcagctggaccattgtagtgactgggaatttgtgccactgtagggtcgctatctataatgagcaaagacacaattataaaaaaaaggaaaactctggtaattgtagctcgtaagggttgtatggtgggtcctgtggggaaaggacaatgaaaggcttggcaagggttcagttggcagagaaatactttaacccatatagaacttcctttttgatataaaaaacagtgagtattaaacagagcaataaaggttgagatatacaggaggcaacgtggttgcgttctggtattaaaaattgtcactgagcccgctgtactaaagggctgggtaagcgctaacgtgtatatgcgatataaagaaaaaggctaggaagtcggaaaaaatacaaagtattcgtatagaaatctgggggccaaaggtgcgagactagtccatataagacacgtaagggtacttttgctatgttatgattacacctataaaacgacaaaattagggataatacctacgcgctaatgctatagggattcgaatcccagggtccgagattggatcactacgcgctgggactaatgtgctggacagcctcccctgcttggtattgcaagatgatccagataaaccaacaccggtttaagaagaggtgcgagcctagtgagcgcgactcctagtgcccctccgacttttatcgtctcgttccatgaacccctggccccgaacgctcgtgtctgtcctctatattctgtctgtgatatagacatcagatgcaatatgagaatgtcgacggggatatcctgctcacagatacgtcgaagtcgaatcggcatcatttttctgcttttcgccctcctggatttcagctctgcagactcgcttccatgggtgatgagatggtccccaaaaggatttggaccagatagcccttggaacactgtgttagttgagatgggtagtgggaaagaggagatcgctctgtatctagggggtggaacagctacatcattctttcttcctactgttcaaatcgcacgctaacctcctactgctgtgccgatgatgtcggaaccttcgatactcaatcgagcacttaggacaacacatccattgattatacgccttacagcttgtgggggtctctggatttctcgcaaaccaacgacaatccggtcttcggaaaggctcaccgtgccacaaatgcgatgagcctatatggggcagaaatcccaagttccaatctaatcgctgtccaacaaggctaccagacctaccccggaggacagagttatcatctcgaagttggctccctagcgctgggtgcccaatacatgaaccagacatttggcaacatcggaggcattgcccctggctggttgtgggacgggtcgaaacaaatcgagtcatattcatacggcatgcacattgggtcatactcgctaggtattccgggtagttggatgctcggtggctacgatcaaagtcgggtgctaggtgacgtttatgttcagcctcacaccggcagttcggcgcctatcaatctactcgacgttagcctcgatgtcgtgaccggtggttcgctgtggaattcttctagcaaagaaggcctatttgcacaaggaaacttttctcttttgggggggccaccgtcatagcagccccagtcgatccttgcatttacctgcctcagggttcctgtgacgccattgctgctgaattatcagtgactcacaacgctgatttgggtctttatatctggaataccaacgaccctcaataccagaagatcgtcacttctcccagctatattgcatttactttcaccaaggataacaccaacacacaagacctttgagatcacttgagttgcaacatgctctcgctgttgcatttgaagaggatagctttgacgaaaaaaatctcttagagaataagacatcatctctgtgtgtgcaggcatggttacagctgatgagtaaagcgacgtcgttcaactacgacactacacaaggtatgagttaagaataactgaaccgagttctttcccgatgctcatggccaacttgcgactatatgtatttcctacatgcgccatgaggtacttcaagatgggctcacatcctcgcacagtcagtttaaagactatcttgaacgatttccaccttttgagtactcggccaagaattggggctatcatgcacgcatgtcccactcaaaagtgaaggaacaagtccaagcttttgttcagagcgagaacgccctttctcaatccctctgggtattgtttgccgatcggtaccttcggcgaatcaagcaggggtgctcaatcagagcctctctactatatactgcagcatacttcagccttggagaatgtcttctttactttctcgccaatagtgtctcccgtgatacaaaggacgatgatggccagactgcattacactgggctgccagaaatggacaagtggaagcagctgaactgctattgaagcatggtcttgaagtctacggggccggcaaagaaagaaaaacagccttgcattacgctgctgaccaggatgactcacaattgataaaactccttgtgcaatatagggcaaatattgaatatacagacatcgatggccagacacctcttcttaccgcggtgcagaatgtgaagcttgagctggctcaagaactagttcgtctcggggcctcaataaaagcgatagactctatgcgtcgcagtgcgctacacttatcaaccaaggggggaagtcgcagcattcagatcaccaattttcttttagcgagaggtgcttgttctgagatatgtgacgtgggaaacatgatgccattacattacgccatccgcaagggatctaaagacacagccgaagcctcaattcaagcaggagcatgtgtcaacgctggcatcgcgaggaagagatggaatcgaacaacaaaagctggccgcggggtttatgaaccttcacctggagaccaggatgcccctggaagtaagctcgttcatggcctaactccactgcattgggcagcactcataggccactcggaaatggtcagatatcttctctccaaaggggccgaccgaacaagcgttgccagggtggcgacacaccgttgcaccttgccatacgcgaagatatcattcgggattacggagatacttggaactcacccgaatggcggattgaagttctcagcgacttggttggggctggaagtgaagaggcttaactatatagaaccacgcacgggtacgcacaaagccaagtgcgctaaaccaaaagggtcactaaactacattagtcatccccctcaggtccactttgcccttggttcatatagccaataacatgctcttccttcatccaatatccgatatggtgtagtggctaacatcgccgtctctcacacggcagccgggggttcgattccccctatcggagtttaacttgacatatctttttagatgcggttcgttttgtactggttttttatatattgtacacgcgagaagaaagagaaggcggtgattgtttcatagtcatacaaaagttcttgtcctgcatagttattacatgttgctgatatacaaaagtacgaatccttactactgacagtactccgtacgcataaagacaaactaaaaaaatcctctgacccgggatcgaaccagggacctcaagataacaagttctcttaaagaatagggcaattacagtcttgcgctcttccagctgagctatcagaggggttgatacggtacaattaggtgcctctaaaatccataagtttgaagttgatccccaggttatcggcagtagatcggcaatagatcgggttttgttatcgatcgggattttcttatcggtctccttatcagtaagtatggcggaagcgtccacgttgacatgtgaaactggagatttcagttgaactattttaggtcgttttctatcatttgccatctaatctagattttcccccaaaaggccctcaagttcccatccggtgtcaacttcaactcagtgcacggtgataatggagtacgctattttccccatcccggcatccattcggcgtcgattaccccgcctatactcttcccgagccgtccccgagaccaccgaatcgagcggggatcagcaccgtggacttgcatcttcgtcggaacctcatctgctatgtcaaagccaattgtctgcgtcagtagtacctgagctccaagggccttccatggccagcgatgacttggatttgttcgaccctggccccgtggggtcagatagtctccgagaggacatggggtccccgacaaaatacgaaaccacatctgggctgcggtggaatcgagtcgtacccggtgagtcctctccggttgatgttcgaagtattcattgcatggtttttactgacggttttcgtgaagcattcaatcttctccgaaatgcggggtatgaagcccagcagccgcaggctgatggccgtctggctcgatctctctactttaacgctctcatttaccttcttgatgctttaccctccgacctgaccaatgaggagacctccatgcttcagcaccatatccccgagccggtgaaagtcgagttaacaacatactcccagccgtccgggtatatggaaggtgcgaatcatacaatatgccctccgccaagatcatatttgcataaatttctcgcctcgatgattttgcagttgttcattgtattgcggttccttctaccatatgcaaaggtgctattgcgccaagtatatgagtatgaccggacacatcgcatcactcggcgtatcatgactatcacactggaggcagctgacgggttggggaaaggcggtgttaatattggagctgcggttagcaagttcaacgaagggcggattggcgctgctctcactaatttcgcggtttggtggatggaaggtgtagctggaggcatatatgagggggttggtgaggggatgatacatttgggtctcttgggaaaagaagcggatttagatagacttcctttagagccgatgagtatgtagatagatagatcataggtcatagatggcttatattagattacgtcccaacgagagcaatgaacatattcatggagtatgacatcacatcttgtagcaagctccttagcaatgcccatcaactttatagtgatttgcagcgatgtcgagaacactctaggccgtaatagcatcgaaaccgatgtgtggaatgttggcactgatgatggcaaactatgaggttgatcgagtcacctagcaattcttccagtgattggttatcgccagacttgagtgcttgttccaggtctccgtagagagtggctgtcaaattacgaagacccatagcgctcagggctcgaaactcccttttggggggatttgatgcctgtatgccttattttagcaccgctctcgataactaccgccctatatgaagccttcggcctatacaaatttcggcatcttcatatttttgggtggtttttgagttccaaaaaaatttctactttgagttgactgccggttttctcttcttctttcttctttcttctttctttctccctcggcataaatccgggtaagggaggtggaagggatcaaatcctccgtctccgctggctccgccgaggtgctggagatctagcacgcttgcgacggactggctttggttttgcggctgcgataataacagggtcagccacgaaacaggaatgtaagggtgtgtggattacctcgagggatgcttcgagcggcggccagatcaagcataggtagacggcttcaatgccgagacataaaggaattctaggatttgtgtcacatttgacgcccattttctactattatggtaattcaggtatttaaattttctgccgttctaaaataaggcatccaggaatcaaagcctccccaagaggagtttggaaccctgagcgccatgggtcttcgtagtcaaactatcaactcatatgtacggagtaaaattagggagttactatttatatagggaattgttgctcacacccccggaaaatcggctctagtggtccgaggtctagttggacttctgtgactgatcttgatcttctttcaccgctcatttcccctccattcagccaatcatccatatttcaatattacttccatcaatacctgctctgttcacgatgtgggaaccagtcgctatcccctttcagaactccaagcctctgcctactctacctacaacagatgaaattcgcgcttgcaccaatgttctgtgggagaccatggcctccaagattgtggcggtgaacgacgatattgttgcaaaatatgggggtactgtcaacgcctgggaaggccaagctttggtttaccttgaacgatacgtcccaggagttccggcccctcgactatacgcgatgtactatgagtccaaacaagtcttcatgatcatgcaacgcgttcctggggttccgctgaattccatctggccatcattggtggactctgagaaggacgacattatcgcaaaacttaaactaatatccgacacaatgcgaaaggccgagtgtccatggcccgactttttcggaggcctggacgggggcggcgtacatcactacctattctatagccagcatggcgataaaaaattcctagggcctttctctggcgagcctgccttcgttgcggcccttgtcggtaattatagagccttggtcgaacgcaataagcgtccagacttcaaggctcgcttttacgaaaaacactgggctcgcgtccttcaaggtcaccggcccacattgacacatggggaccttcagcagaagaacattattgtcgcagagaatacaagtcgcccaaacgatcaaggtgggcgatcatttgatgtcgtactggtcgattgggagaattctggctggtttcctgacttctgggaattcttttgtgcatcttccccctttatttttgactggggagaagactggtcctggcgagtccaggagtttcttcaagtatggccagccgaggtggccatgatgcaactgattgacagggatctaggctggtgaagtacgttgctatgtttagaacgaaatcgatgtattcttaaccacaaagaaaaaataaagctcgtcaacttccatctcaatccttcatcagaaggctctggccgtcatctgcgctccgcaaacaggcatccagagtgggtggccccgattcttctgggatgcgatcgtatgaccgcaaaccgaaacaaaccgatacttcaaatttagctatgtaaaatgccttcctgtcgcaacttcggaatcgcaatctgatgtgtccattcattgcactttatgattggccgtcgttgttcgcctggcccgtaaagctccccattctccttcgtccaagtgatcttattccgcttgcttggatcatggctccaaaagtcaatcccctgctgcttggtcggtgtgggcaaggcttctaagataccccttattctcggaaaatcgactttgtaaatccatccaatctctgtggttctgtgaaaatgcgcggacgctccaggagtatagctttctttcacatcgaagtacatgccctttgcggcgatgatgtcgccggtgacatgaaatagatctccttcgaaaatatccgggtctgtttgaatgaagacacctgtgtggtatcgcttcgcagggtccagaggatcgggggctgctgtgtcgaactctggtgtgaagactctgtaccgctcggatgcgggaggattgtcggacatgtttgatatccagataaagacgtgagaaggacgtagcgttgatgggggaaaacagagtatatcaaagtattgagacactggatagtgaaaagatggtggtttcagtcaggagaaaagaaaacaaaagtgaaaacaagttcagtaattacctcctcaaggcaagtactgtaatgggaaggaatgtaggtgatctttctttttagaatgggattcattcttccttttataatgtcttccttctataatgaaagtatacatgacatattttaagtatcatctcgcctcgtctgaaacaaaccaattggacagcaatccccgccaggtctcaaattaggccgagtacctcttccaaagttggcgcccggagtactcctttgtagcctcactttcagctctctgacgctagcgctggacttgcatatgtactatgtccagccatttcccttttatggagccaatcgtcgctcgatttctcctctagttatattctcaaaataatcacactggctttgttcaaatgtgtatttattatcgtgtcgtaatagtttgtaatgctgaattaagcaattggacgacagctgcggagaaaatctacacatgtctactccgtatagcctgcggggtatcggctacgcgccggatgctgtggaacgtgccgtctttccacaattcgcggttttgtttcgccttgaaacattggctggattgaagtggtcaatgacctctaagggcttgccgccagcctgaaaagcgcaaccttggaaagagaatttgttttgtcagtcgatcaaaagtggtcctagatgggcgtcaacgaaaatgttcgacgttgacaccgaaaatagtgtcgcaaccaaaacgtaccctttccaggctgagccgctcattgcgattctgtccaaaataccttgccccggctcatctcccggtatgattagacttccggtgtcaattttattatcacccaggagcagtgggtgagcgttgaggcggcttactggtcaaagatcattggctagcacgtttcccccagggtgagcaactgctggctgcgcccgctgtgctacgaactctgtatggatccctatagaagtgcgctttggtgtttcatggatgcattagcgaaacgcccacgatgttcgagctcgacaccttggcacccgtgaattgccaatcatttttggtagccttatctgatccaagaggaatatacatgccagccgaggaatacatgtcagctaaggaatactcgtgtcagtcgatcagccctgtttgtcgatccgtgaggggtccatcatatgatatgcatgttgacatcggggcctttgggcagatagattccatatagtcgaggacccccattcccaacgaggaagagacactcgcacaacgacaaagtcgctttcaccctcggaggactgacaagcattagtcccagacaatacattcatacatcgtatcttacccggttgacagaccacacactggaatacagtgtacctttacattatctctgcaacttaaataatggtcaataagcatcagttccactaaatattttattggatggacctggcggatggttgcaaacacaaaaaagttcgcttggtctaattgtgtggactcctctggactgcgccaacttgagcggtgaatagatactcaaccctagttcagcctgttgagtcttttcagttgccaaggttgatttgtatctcgggaggatacgtgatctgggctcaaccccataactgatcggtgatggtagaggatttgaataatatcgattgtaccgccaggcccaggcgacggcatggatctaggagtcacggttcgactcgtccgttagacaactgattcaaaaaaagggagacaggagtgtgaaaatgcaattaattgtggtgcacggaaatatagtatcttaaacgggtcaatattattctcgatcttggaacataagcctgacttggagggtgcgtactatcactacaacatcctgttgttgtatgtatgtcttctgctctgcagcgagagaaggaagatagcagggctttacgagtcgatatattctagaatattagacttccaatttacacccgttgttgtatgaggggggcaaatatactgatttgaaggaggcggtggaaaaagcggtaggtagaatcagccaaatcattttatagtcacgattggccgttattctcccccgtatagccaggtgagcgtcaaccccggatcttcccaactccctctgctaaagtagacatgtcgacctccaagttgccctgcataccttcacttcgaaagcagcagctccacctggaattgtgagcctatgtaccccgcgaataccattttatgtattgacacccctacagcgcgagcctgagacgtgcagcaccgccaggggtttacatgagccttgcgcctggggacccgacactttggaatggagtgatatttgttcgctcaggtgaattcaaatttactattccctccgccatgcgtcgattaactcctgtttgtaggtccctatgcttcggccgtcctccgattccagctccgcttcccagacacctatcccgaccttcctcctctagtcaccttcgcgacggacttgttccacccattgattgtgcctcttactacatatacctatagcactggctcggcaagtgacaatcccgtcagtgcgacggacgatgaacgattaccgcccggcggattcagtctgcgccatggattcccccactggtttggtagggcaaaacggaacacatcacggaatgtaagcggtgctagtgcaagtgctgcatcgatcggacgcgcaagctctaccgatccggttacagacgatggtgatgaatcgaacgcgtcaaaccctccagcggcatcagcggctagtgaggacggcgatgtagaagcatcgcgggtggcagaagtacctgctatagatcagttttcggaacgaagagacgttgtccctgtgtccgagatactggattacattcggtcgacctttgatgacgaattggttttggattcgctgccggttgaggttgccgggaaccccggggcatggcatgcatggcaggcacatcgtcgaggaggccctcgaggacaactgaaacgtggaagcccgcaggctcggcttccgggggattggcactgggatggaatttgggccaggcgggtgaaagatgagattgaaaactctcattctgagccgatgctgtttggaggtgctgctcgtgggggtgtggatgaaatggtacatgacccttggcgtcctttcttgacttgtactaaccacattttagattcgattctcgcggctggatgatacaaccatgaactcagtcaaggagaaaatggctgcaatggcaggggacgggatataagtgctattatgatacccaaaatgctactttacgttgtcttaaatcttcatcgacttaatctcggaatatcccacggatcctccgtccaggagccatggaaatgccatcgtcgttgccatctgaatcgtcggtcctcaggaagcggcaggagcatatggcttcaacgttgtttacttccccatttctcctcctcgcatcattatatcccagcaaaatgacctataagctatcatatgatatcaaaagctcagctttaattattgcattgatccttgttcctatcgctgttctcgtctttgttgttgtcgtcgctcttgcgtgttccaattactggagcattcattccctcaaagaatcgttcctgtcgtgcttcagtatttggaagcagcagagacgcaagaagatcccatcggactcagagacttgccccatcacgccccggtcgactctagttcgtgcgacagacgcttcggatattcggattgaattcgagcgtcctgtcaccaacagagagcatatttaaatctcgcgacaccatggaggaaataccaactacgccgatttctgttcttaaacgccgcaccccattcattgcacacatacatagagccagctcgacatctagctctgcttcgagcttgtcatatccacagatcccttctcgccattcgtccctttctgcgagcgtggaatacgattcaagcgagcttgcaacatcaaccagaagcccgtctctcagtgatagtctttacaatattgatgtggttaaaattcgtcaggaacatgctgcagcttcccgaggtatccgcaaggctggctttgatgcgaatgaagacccatttatcgatcaggtaatttccgccatggtttcaagtgcattgtccttactgacctttcccttcagacatcgcgccgccgggttgatcctcgaagaggactcatgactcagagtggatatcaactggcgccacaacttcttgtccgctggagctccgggtcttatggttctatggagccatgtctctcgtcgaagtcagcctccgtttccggcgcaatggaaccgccaacagattccatctcgaaacataaatccagaatggacagttcccggtctttatcaaacatgctgcgcccagggtcatccgggttactttgtccgttggagcttcctgtcgcgttcgccaccatgaggtcctacacaggctggccgtgcatgggcacagattcgatgtctgtgtgggcgtcagtaaatgtatctgctgatgttgagcctatttcgctgcctgagacctcgaccctagcaccccttgacattatcatactttttgatagcttgtgagttgatccgttggtttaatcgtcaagagaaaacatgttttgctgactatcaaataggcgacaatcttctgttagccttttgacgccaatggtcttggcatcttctgtgcttgcttcaaatctggtcagcaatgacagaatagccgtagcatgtgttgacggaagttctaaagacggttttaagctattccttccgctggggttccacccattcgagacattgagagctgccctgaatgaattttctctccgccagttgaagaagaaaacgagaaaagcccctgacgcgagtaactctattcgacaggcatctcgactcttttacccgtctcccagagcagcgttttgtcatctggtattcatatccgcgtttcccccagaaaatctgtttatatctggcgtggacacggctattggtatccatacgatctcccctcagccttgcttccctcttggcacagcaaaccatccacttggatggcacattttctatgatgccaatgcagatgatccacgatcctgcgaagttcatttcatgcgaatggtctccaaagtcattcggcagcttcgtaccggtctcagccccgggatcctatccaacttgaaattgtttgttgagcagggccacggatgccagtttgattcggcaatggaagactgccacctggcgcggttacgaccaggggagacgtggatactcaaagtgaaaattggtgttccgattgagttttatcaggaaacacaattgactgaacatcccgtgttcgaagacttgatcaggcagatcaacagtgttctaaaagcgtattcttctgagccggccgcccagcatgttctaagcgcccacctggagcaccagcactctttgctaccgaaaccccatgctatttgcttggaaactcattgcactatctcgcgcatcccaggtgtgccgccccgtccttctgacgattatcgcaaggtttcagcgctaatgtcgtatgaaatggacgatgatgctatcagtatcagcttgggatcttcaagcgaactcagttgagatcaactgtttgtatttgctcgatggagtcatcacactattcttatggcctaatgcttgatttgctcccgacttgaattatgctttatatttgtatctgtataagaaggctttctcttactcttggagtataagtttcaattggatgcaactcgctatttgactaatgaagaagaactattccttgtgttcaaattcagtactggaactgggtatagtgtagatatgaccacacaaacgtcgcaagtcttcccaatgacggcaaagttcgacagcaggggatatcaaatgcgagggtagacattgcccgccatccgccatgtctctttgattaaatccgcacatttctctccgatgccgtaagccggcatctgggtatgtcctccatgcaatgtaggcatgacactgcaatcagcaactcgcagccccgacacacccctcacctgcaacttctcattgagaacagccatcggatcaccattcttccccatggcacaagtacccgccgcatggtagcctgtcaacaaaagtcagtaaccacaagacgaaccgtccttccaatacagcactcacaagtagtcgcatgctgcttcacatacggaacccactcctccctcgacttataagtatggtgcttcaaattcggcggccaagaccccttaacgatatccttggttccagcaccctgcataacaacctcattcgcaaaccgacaagcctcactaagaaccaacacatcaagcggatcagcgagatagttacaatcgacaatcgggttaaccgacgcatccgccgattcgagcaccaccgagccacgagacttcggcgcgaacagctcggcaatgatggaaaacgcgtgctggttattgatcgggaattggtcgtattgcttgggaccgccgtagcactctgtgctgaagaactcgatgtttggctgctgtggtgtgagacccatagggtcacggccgggttcgcgggaggtgtttttccagagaggctcgtcttgcagtcggtcgtcgaggcgcgcgaaggcgaagctgccgaaggggaaggtggataggaagccggttttgttctctttccactgtgcgtaggttcggtcgaagttgttgccgtggtagacgtggtggtcgtttgttaggccttgcttttcagtttcgtagaacatgaatacgatctagaggtgtggactgttaggatggttcatgttgatatgatcgttagggaatactgacgagatggtccatcaggttcttgcccacgcctggtaggttgaccaaagaaggaatgttgtgctgttctagctctgccttggggccgatgccagatcgaaggaggattgcgggactgcagtaggcgcctgcagagattatgatctcctttcgagcgtagtagatgcgagagccgccatctgaagtttgcgtgactacgcccgaagcgcgagtctcgtttctctgcttactgaagatgattttgtcgacagtggtgtcggtcttgatggtgatattcccacggtggctcttgttggtaacgaaatcagcacccgttgtccgcgtaccctggtatactgtgcgaggtacatggccacatccttgtgcaacatcgccggtgctgaacatgtcatgatgaagaggcatgccttgcgagacataagactccatcaaaagcttggagattggcgccagatcatgcggctctgtgtgaaggggaccggagtgtccgtgactctctttgtcggcctggaaccatggctttgggtgaaatgtctctgactattcgtatttttgttgtcagtgcctgcttattcaatgcggcgtgggaatcatatcacctacttttttcatatactcgaaaaactcttccccactccacccatctagtccccagtcatcataatccagcttgttgccacgaatgcaaagcgtgccattgcacccgctggatcctcctaggaaccggccacgactcagcttcacttggcgattgtcaacccctgccataggaggagtgacgatattccagtctgtctcggcatcgaagttgtttgaccacctaatctgtcagtgatgaggaatgcatcaaggagggctttgcgactcacccgccggtcatgtgaacattctccaggtccttgttatgctgcccagcctccagaagcaacacactgacctcggggttttcagctagacggccagcaaccacacagccagaggttcctcctctaacttatggtaagcaagattgtaagcttctgtgggtggataactatcttacccgcagacaacatagtcataggtatcctcaattccagaagccatggtgtagatttcagatcacgacttcatcaagatggcaaattaaagatcaccaaaatgcatgaaatatgagctcggctttttacaccggacttctgaaataggggaggacggaggcgattccgcatactcgtgggtaacttgggacaatcttacctgtttatgtactaggcagcgacattgggcttggcagaagtacatttaatgcatgatctagtgatagacttgcatcagccggcatatgattggtccaaatcaaaaacctcgggataccccaaagtgtggagtttgcggaatgtccagtccactttccgctcgcggggtatggggtatgggtgaaaagcgggatggttccacatcaaaggttatagaacagtcgattcgcacaccaaaaaagagcccacagggccgttattgtttctatacagcagtctcataacctattgagatgctgagaaattcgataaagcaggggcgtggtccaggatggctttctttccccaaaccggatccccatcatcgtcaaactcagcccactgaaagaacgaacacccttcctttcctggtgcaaaaccagcatagcacatccacatatatctgcctcgtgtctcatgcttgcgttgtgcacaccggagaatcgtatgttcaccacacttacaacgtggagtgtagcgtgggtgtagagtatcacgataccaacgataggtgatattgatacgtctgttaccggatatcggatgtggggagatagcttgagcgggggtaatggagtgtttccactcctcttgcatctctgcgtgcataataaggagagaattgtgcggaagatagatcgagatttggccttgggcgtcagcccgtgcagctgatgcagtctggtttcgcgcaaattttgggactggactagtcttatccgcatcttgatcttcttccgcagtctcgtcgtctcgggctactattcggcggactcggaattcgcgtgccacgcccaagctcaagcttcctatcactgggtggggcccaagataggtcagttcgtcagagtgatatcccacgctttcggtcggcccgtcgtagcaattaacgaatgctgcgttgggccgccactcctttggtgactggtactgtaacttctttccgcctggatagatgtctcgaattcgtttgttgatctcgctgttgacattgttctgtacttggcgtgacactaaccgtagctgaggtgttacctggcgcacatttgaccgatatgtgccaccgtatgtgtattctgacgtctgttgccggtgttcttcgggcgtagagacgtacacggcgtgtgtgtggggactctggacggtgcggttgaagagttgaaagtcgtaccgagaaaagtgtttagattcatcaagtaattcaagtagaagtgtatttgcttctttagctggtaggaagttgtggatgatagtacaaggtgtgtaggtggcaatatcctcaggcgagtagaggtgtaacgttttgcccttttgtgggaggggaatgattttcttactcgcacattcattcaaaggtttcatgcttccgtcttcagcttttgtaagaatatgcgatgagagagatgtctgcattccgaatgatgaggtaacagcagctcgctttttgctgacaagtgtgcctgccgtggagcctttctcggagagaagtccagcagcattctccacagacccttcgcaggataccagtatttccaatagctcatcttgtttgatagtcgggaagagagagagcagtattgctagcttggtatcagtggtgtcttcgtggggatctgatgactcgggcttggcctcctcgctcggatttaagagccgcggtcgcttcctggatatgaaagcatccatggatgttcccagtctcatccttttgaggctctgaaaagtaacgaatgggcctcggggtgcttatgacaaatcacgataaaatgcttatcggcacatgatttccaccgaagtgaccaatcagatcacgcacagtatgaggctctccgtagataggtgcaaattgtagatgatctctatagaacgacttttaaactaggtagaatttctgaaattggcgatattggtctgctatgcatggctcagcatgtctactttcatttcgtccaatttgggtgacccatcatgaggttccttcctactatatcgcaagaacagccgcacttgcctttgtgtggtcttaccttggtagatgggatggtacggccaccagcatcggtctcgaactacacattatatacgatatatgcgaaaaaaaatggttgaaactgattgaaagatacactctaatacagactaaatccatttgccctctcccaaatatacctgtccctcccgatgatactcaaccaggggtttcatctgacgaagcccatcaaagatttctaccaatgcatcgagtgccactatcgtccacccatgataatccccctggttttctgtaacgtaactagatacacgttctatatcgtggctcgtgagcgggtgatcatcaatcctcgaatccggaaaattctcctcaacaaccttcacccagcatccacccacatctgcatccctctcggccttcgacgaacgatctaaagcgcatttcaagtgcgagaagactgcatcatcgagcatcaagcatatgcgcagtctgcttgggagctctatttcaggcatcgcgagtgacaccttgaaatcatgaaacacttgtcgaatctcttcctcattcaaatcggcgaacatatctcgcgagttgaaaatcttggaagaatatgtctctgtgagaatttggatttcttcatcggatcctgtcaacgtccggcgcaatgcccggctcacggaatggttgaggtagcgcatgaatacagggaggaggcgcttggattcgggggagtaagaggtgcggtagacgatgggtccccatgagagagtgataaagtcacgctctgggcctgggggcagggatctcaggcctggcaatgcaccgagtcggtagacttcttctttgaggaatagactggccggggatgtatactgcttcggtactggcgtttgcttgtcgcctcccaatttgggtgccatttggctatcgtggattcttgggcttatcatggcagttggattgtatattaagaagagtttatgttcaatcagaatcaagccgagcagactaaaaagcagatcttgaaagaggccaattgtggcgtcatttccatactttgcagattgaggcaaaatattatcgggtggctcaatttgtacctattgaacatgattggcttaaatccgtaccagcgaatagataattgatctagaatggttccttttactgttgcaattggggcttgatgtagctgtagatgtagcccgttgacgtcaacgaccacgaacatcacatactccaccctcaaccatcgacccagcagataagacgagagcgacacaagtgacaacatcaaccatccaggacaatcagctagcaagtatggagatgacacaggtcgcagtagatattattatctcctaatgcaacaacatcctgtaaactttttcattctgtgagtggtgactggtctagcttctcctctgggattctagttcacatgaaggcccctagttaactaaactttctctctgtctggaagataaggctactactaggataccggctttcccaactgcaatactcatataggcagagcagatatctctgtctaagcatccacctttctctatcattatagcttccaaaacatgcactagatgcggtcactcgcgtcctttagagctatttcgctcgcgcgctagcaatcaagaggccgatcagtatcaatcttatcgagatgccaaaaagaaagagcgttctagacctactattgcatcgtcccccccttacactatcacctctggctataaatgccccagtaccagaggcatctctgtcgccagaaccctcattgaaacaatttataggatgtaagcgcaacttacctctagaccagttccagtctacgtttctctcgacagagaccaaacaatgccagagatgccgtgattactacgtggaggcagcaaagcacttactttggatgaaacgactgctcaattcaattgaatttgacgcacaacacgatctaatattgtcatgtgacaataagcagaccattgatctgatgaccaagccaagttcatcatatcagacgaaattacgccacgtggacatcaataaacactagctgcgtgagaaggtaagaaagattcaggacttcaaggtgcttttgggacggaaggtgttttgttaatccgtcggcgatcatatgctgcctcagaaagtgcaactaactctgcttcgaagattaaaaagaatcccgacattcgctgatgtctgacattcgctgagctctcggaactcggattaatacatgttcctctgtgccaagaggcgctaaaaattggcggtcccatctgggcgagattcctagtatgcttcatgtttgcttgctcgtttgcttactcgcttactgttcgcattgtttactttacatggattgtttgctagatagctaagcgagaaagttcaagtttgtaacgtttgcaaagtggtcagctatatcaacttgcttcttctttctttctccatcttggttattgggttgaatatactctttcttcttggtcgatctggcaccttgtatcctgaaggagttcatagaaagaaattacatatgacgccattattgtccgcatcgacagcgtcaaagcccgttctaagtatacgtaataaagtaaattcaggatcatcacgttcaatacctggaatgggcaacagatactaaaatttcctatatcatctaaagcagattctccattgagaaaggcttcaaacaagaatacaaagacgaagacgaaagaatcatcaacaaccaattcattgagattatttttagtatgaaattgctgacatagataataaatcaaaagcgaatgtgcaagtggcgtgcctgaagagccaagaaaggacctcggcccatttgatccccgcaatcccgagatcatacgccaatctcaactcgacatcttcacgagctttgacgtttgtctttttgataccctatagcttgcttgacgatctccttttttctctttctatttctctttcctacctccctccttgggcgaccggcgccaatcagttgctcgtcatgctccattaccgcacacaaggatataacggttgcgccgtcaaatactccccattctttgacaatcgactagccgttgcaagctcctcaaattttggcctagttggcaatggccgccttcatattctagagttgactgcgaatggaatccaaccgctaaaatggtaagtgggatattccagaccccgcggcggagtgtgctacacagaaacctaaccatctggcgctatacaacctctaggtttacgacacaagactccctatatgatctcgcatggtccgaacttcacgagaaccaagtcctcgccgcatccggcgacggcagcatcaaactattcgactgcacagcgaacgacttcccaatctcaaattggaaagagcacgcgcgggaagtattcagcgtcagctggaaccccgtcgcaaaagaccgcttctgctcaagtagctgggacggcacggtccgcatctggtcgccgcatcgcccacagtccctcctcaccctcccaacccacagctgcacctactccgcatcattctgtccgcacagtccagacatcctctcgtgcgtgacatcagactcatacgtgcgcgtgttcgatctccgcacaccggcctccgcttccaaccacctcgtcacccagatccccatccacggcggaccccccgctcctgcaatccccggccagccaggcggccctaccccgcccgccgaggccctcactcacgactggaacaaataccgccccactgtcttagctacggcgggtgttgaccgtgctatcaggacgtttgatatccgggccccgcaacaagggccgcttgccattatgctcgggcatgaatatgctgtgcgaaaagtggcttggtcgccgcatctttctaatgttcttttgagtgctagctacgatatgacttgtcgagtgtggagtgaccggtcggacacgggcccgggcggggatatggatatgatgcgcgctggcccagtgatgggtgcggaactagggcgcatgggtagacataccgagtttgtgacgggtgtggactggtgtctctttggaagtgagggctggtgtgctagtgttggctgggatgagaatctatatgtgtgggatgtgcgagccacgatgtcatagaatttgacaaatcaaccaattatatatctctggcagggtccgaggcttatcatttttttccaatcgaaacggagctatgctatgtaggattttactggacacgtgtgtttaagatatcagattgccagacagcctgctttaaacggagtgcataacttgaaagggatattgatcattttatttcgtattatatgccagagaggctaaagatgcaatgcgtggtgcgatataagaacaaatgcgtcactattgcctattcctcaggcttaagcattaagccttttgttctgaaccctgcagtgactcaatgactccgaatcaagataagaggctcacaatcttgagagaaacatccatgttgggtatttgggagcatttagactcagggccatggtcagtgagccaatatatcgacaacctcccaataattcatgcgcctgaatgcttatgatcaagtgacagacccatctatttgccgcccagtctgccctcgaccttcttgcgctcgctatcccgaagggcagcaacctcttccttggtagcattgacagccgcgtgcacctggttgaatgggttctcctcgctcttctcgaattccttccggcagagatccatacgctggttccggcgcagaccggggttttcctgctcaatctctggcaaacgcctctcctcaaatgcggcatatgcggccttgaatcggcgctccgggtgtcggtcgatcttggatgtgtccttcgaggctagagacagggcatctaatgcgttatcgataccagtggcgctgagagcagattctttcttgctgcctgcaggagcatcatccaactgtgaaagatcgaggccgcgagtcttcttttgtgcggtcttggcgtttgcgcctttggctttggctggttgggaggcttcttcttcggcgagtagggcatcgcgctctgccttcttgcgggcagcctcagctttcttagcctcaacatcctctctgtagattgaaaatgatcagctcggtactcgaggacatgttctccttgagagattgagttcacatacttcttagcactgctcttggatccctttgtccattgcttttcctcctctgaagccttcttctggtcctccgctgccttttttgctgctgcggcttccgctttctgtacggcactatcagcttctatccaaacgatcttatgcttgaggggtgtggcaataatagcgggggcggggttcagaaaaaacatacacgagcgtttccggcgaccttcttggtgttctcgcctgctgctttcttgcctgccatagtgaaatattaggtccaaactatacgccggacagatcgagcaatggatatgaaaagaaaacggtggaatcgagcttcgactataacttacatgatctgatctgcggaaccaatatgccgattccgatgaaggcggtgactagtccgtgcgtcaatgttggtgccttatgaatgtggcaactgtcgaagtttccccgacatttgtaatctcctatctcacctaggcagcttgaagctgtctgtcttcttccggccatttgtgctatggccctgatatggttcttatgattgataattgtggcctttgacttgatttatactttgtcgctgttgatttcatttaccgattaagcagcgtcctcctccctactagtatgacctgatcgtccgtcacaatggctttgctcttccgctttctacaggcgttcgccttgctgctccttgccagcgcagttgtcgctgaacacacctctaattgggcggtacttgtatctacctctcgcttctggttcaactaccgccacctcgccaatgtcctatcactataccgaaccgtcaaacggctcggaattcccgattcacagatcatcctcatgctccccgatgacatggcttgcaatccccgaaacgctttccccggcaccgtttacagtaacgcagaccgcgccgtcgacctatacggtgacaatatcgaagtggactacagggggtacgaagtgaccgtggagaacttcatccgactcttgaccgaccgcctcgacgaagatgtgccgcgcagcaaacgcctgggatctgacgccggcagcaatgtgttagtatacatgaccggacatggaggcgaccagttcctaaagttccaggacgccgaagagataggcgcgtgggatcttgcagacgcgtttggacagatgtgggagaagaagcgctatcatgagctgctgttcatgatcgacacttgccaggccaatacgatgtacacccatttttactcgcctaacatcgtggcgacaggctccagcgagatcgaccaatcttcctattcccaccatgcggacaacgacgtcggcgtcgctgtcattgatcgctggacatactatgttctcgaattcctcgagacacaagtgacaagtgtcacttctaaactcaacctgggagatctgttcgattcctatgatgagtcgaagatccactctcagccaggtgtccggtgggatttgttccctggaggcgagcaagaaggccgtctgcggactgtggttgacttcttcggcaatgtgcagaatgtggaagtcgagaatgcaaacgccacagagcctggctccctcaaggaagatttggctgagattgcgcgacttgtggagaagtggcaaaatcgtgacgaggaatattcagccatgctagctgattccgctacaaatgtcactgaagacctgcattcatcgtctctacatctgaagctgaagagcactgttgggccaaccaaaatggcggaagacagcagctggggcaagcggctagttggcatctctgtcgtcggtgcatgcaccgctatctgggtggctggatcgtttctcggccgctcgtctgtttaatattatgcaaaaaagcatctggttttctttcctttggctgcaatcttgagttttcttcccggactcacggattcatggttataatgtcttcgttggaatagttttggggaatatagcatattcatggcgaaaggcgttacctccgcgattattgaatttgaagatatcctctgatgagaaacaaccatgcctttcagacacttaaccaaagtaataatcctagtaaagatgcaaccaatatatcgcaaagttttcgatacatgtcactccgggcagtgatgttgttcgaatctgattacacggcttcattccttggtcattttgagaatataaagtgtacaaggagttgacgaacccacacccggccaatatgaaaatttccagacttgggtttccgaatgtattctcacatcacttgctctaacgtacgatgactcactctccatagagcagagcaatttgaaaataattgcggagcgaagcgaagcaattacaaatcagaaggtcgtacgtacgtgtcacgtggccaagttttctcctagggggagaaataatagcgttttaatgcagcgtcaggtgaccaggtaaggtcacgtggccaagtttctcctaggggagctgaattatgacttatgacaaaagcaggggagttgatctagccgaggggttgctgtgaagccggtgggctttgcgcagcattagaagttagaattagccgctttgctctgcaacgactatctcgtaggccggtgagatcactcgtaatatcagaattattagaggagcgacggactggcacgtcatacttaaccagctctttccacaacacaacactcaacccaactcatctgtcacaacactcaacccaactcatctgtcagtacacgcaatcatcatgaatccacggcgtgagggtcaaagcagcgatgaatcggcgacatcggaagccctgtccatcgcgcagaacgccagaatttctcaacagttcttagcaacaaacctcggactcctgacggattcggcaattctccaacgaactcttagcttgaattctgtcatttcgacgacctcttccttcagcatccgttttcagaatgcacgttctcgccccgacttacaaaccctcaaccaaatcggagctggcttgcagggagctgtatttgagcaggtcggcaagcctctagtactaaagaaggaatttcctggaaacgaagacctgccatcgaacctcgatcatgagtataggatccactgtactgtttcggctacattcgagtattaccattccctcaacagcgaagtccacgttccaaaaccttacaactttatcttcaaagaagagaataatgctttctgggatgagatcttaccaaaaatccctcaggcctatcgtatacgtggagaccttatgatgatggaacggattcttccgttaccgaaagtcgtgcgaagggccttaatctcccagttttatactcctcaatacctcaataatactgggattgaggctatcctcaatcaccctggaaataagcactgccttgcccgtgtctatcttggtaaggcaaatggtaccattgatcaggagactccgctacgaaatttccctctgtaccttgagccgatggagcagattggcatcgagactctcccgcttgcaaatgcgatggggaaagcctatgcaaccctacattgggccgccgccatcaacggtgatgatgtggagtttgttcttggaacgtcagccatagctcccgagggaagataccatgaacccgactttcagcaccgcgccgttcagttatatctcttggatttcggacaatgtgagacggtagacctcacccaggaccccgatattgtctatcaagctttcaagggagctatggtgacaggggacaatcagcgtttcatcccgcattacttgaagagcccggaactgttcgcaatattccgaaaaggatacactgaagcgggcaatagaattctattagataagcggttggaagacaagttcaacatggaggacttcatgcagcagtatgaggagtatgctgaggacttcctgtactagcttcgttgcaatgactggggagctgatagctaaacttgctttaccagaatgaggagaatatctttatcaaaaatacatttaaggatgtgaggtgccagattgatcttgaagaagaaagagtacattcaactaaataacgaagatgaagacgcaagttgcaaggtgcgaagcagcctgttgatatagccatagtcgtcgttgcttaagctagtgaaattcttacacattaactacgtagctagttggcttaataaattgctgtttattgaacgtattgcggagcggtatcccaggctgagctgggaacacaggaattaagcacatctcgcatgatcacatagttcacattaattcgcaggcatttgggagcctgaaatgactcagtcgatctccttccagcctatggcaatggcgtgtgcaagaagtcatcatcgctgtcgtcttccacgggcacatcctccaccggcttgaactggatcattatgtccaacatgatcgcctttcggtcgctgccgatgaccggcacccagttacactctcttatcgaatcgcttcccggagcgtgcatcatcggaaggatctggccggttttcatgtcttcgaagtcgaaggacatcagacactgtgtgtaacggtaatgatgtacttgtctcacaaaggggcctgagacaattctcatatggtcatcaagcctgtacttgcggaggcagcaggaacgaaccccagtcgatacctgcaagcaggtcttccacgtatcataatcgacaaagtccacaatcctgtcgtacagctccagcgggagaatgcctgctaatttggatgctgcgcggcggctcgaggcaacttcgaagaagttgacaagtgccgcgagcccagggaaatggcgttgtagtcttcggattgtccccttgcagtctgagttcaccgtgcgtttaccatcccgattctgagcctccattccaggcttcagctctggtcgctggcgcggatgtgtgctcgcgcaagcatctacacgcagaggcgagagcttgacagctttgctggctttggcgaatggccccgcctcaccatcaaaggagacttctgcaaatgccacttcaaagagggataagatgacaatctggaagttggtgtgtccgcgctcgacaccccaggcaacggcctttgagatggaatcaccgtcaaccaccagtgcaagactgacaagcacgtcctccacccagtagatcgtctccatgggcgatgcccctggaggctcgcctggtcgatgagctggggagccgaactccagtaacggagcgctatcgccaacccactcttcgtcaacccatccaggtaatctgtgtaagtggctcgacttgcaggtccatctctggcatgttcgagggttacactcctgaacggggaaagaatggaatttggtctggccagacgcaattgacacgagagcaaaagtcaactcgcgaaaagggaaggagctcgggctccactcctttccaaacgtaataatctgcgtctcgtattgactgatagtatcggctagaacttgtgtgacaaacgccttcggtgcctccgcgatgtcggtcctcggggatacaatgcggaagtcatatttgatgtcccatgttggctcgggatactctaaagccggtgaggccatgtgctcttcgggacagatttcaggcgagatggtggactcgtaccgatagatgctgcctacaatggcacgaagccataggtcgtcctgacgcgggacattccccagcttccaatgtatggtgtggttcatagtgaggacttcatgatcgaggttgatgatgtagatgtactcggcccagttattcagctctgggaagtcggaaggaagcgactcaaactcctcaaactgcgaatagtcgggtttgacgccgtcacggatctcatagacatctctatcgagaacactttccttggccgcatactgggctcgcatcgactcaagccatcctgcaggcattagtatagtgtaaagcaagatctttattcgcgccgtactgttgtatttctcagggtccgttgggatgctcgcgactatcttagcgccgagaccctcaaagtaactgtcgaaacgatgccagcgaatgtagtaacgcccgcgaaagcgtactatctcaagacctcgtgtgcccattgctgtagctggaaatttgattcttagctctcgttgacagaaacaaaaagagctatagttaccaagtgggtggagacggtgggataatcactgtgggtcacgacgggaagaccctcagggcttgacccacggggttgacaggatcatcaaacaagacaaacacaagcatgtgactgggtttagcgaggttggttcattgattgatctttacaagcttcaatgttggaactctagttccaagtacatatgcattaagtagtctcaagcgcttgatgggtgtatcagaggaagcaggtctccatcatttcatcttccgcataactatcaacatcagatggtctgtaccttcttcaatgtctcctttaccgtctcccgatgatggttcctgaaaagggctgtgtggtatgttatgcctggctagttctttgccatcactgaccatgtcaaagggagtcttttaggtctcattatcgtcatttgtcgcttcttttcttggtatgagagatatttccgtggtaaaagccgctgttgcatgtcaaatcgtggtcaacacatgaacaacatgatcttctgaatcatctttggctttggcttcgaagagcctcgccgataatgaccgatatctcgagcggagttaaaaagacgctccatacctgcttctgtggctgtaattgacatgatatctcgtgcaaggctcgcaggtactgagaagttactgctaaccgtcatctcgatattcaatcatacatcatgtctttaacagacacaacgttgagtggccgttcaattggcaacaatttgacaaccgccggcgaagttagaaagtccttgatcaactcaaggaatgtatatcgactacattgacaaggcagcctctggctcaatacacgccttctccgtttcgacatgctactaggagaagtgcaagcactggaacaggggtttaatatcgataattgatctgaccgccgagagatcctccgttcctagagagacggtaggaaacatgattcgaacaaaggattttcgcgtgagactcaatttaagagtatagaaaaatctagcgtaaagcacccaatttgcaaagcatcgcgcaataagatgaaccaacatattctgtgaaaatactcatattaaattcaaggagttgaggagtaagacatttaaatagtgaaatattccgataataaaagaatgggagcaaatatcgtcgaggtgatgaagaggtatggaatcccggcacgtgcctccgacgcgtcgcgcttgtccacttccccggcgctatgagagactctttgctgcaagggcttcaccccaaataaccacctcacatttctgggcttattcttacgagttctctttcttcatgagctgtcgcatgagcatatgataatcccaagctggccatgtatctcccacggcagctcatctcacacctctacctacaactcctccgatctcaccacccgctttctccacccgtcctgattctcgtggcattagagccagacgcgctatgtgcctgtcgaattctcacttctttgttgaaacgcgactatatcccccataaaatccaaccagttgcaggatatggcgaccttgcgcgtgcgggggaggagatggtccgcccaatgcagactaccaatgggggcagcggaggagttgtggtatgcctcggggtagggggactggtagatctggccgagatacttgcgttgagcaatcctgaggacgaggtggaagatatgggaggcgtggaaatctgggtattcgacgcgcgacggccgtggaacctgggaaacgtgtttggtggacaaacggggataggccagcacatgactgaaattgatgtcaattcgcgactgcgaggacgcggggttgacaaagggtgcataacttccgcttacacgtcgaagaatggtggcattatcgtgtatgacgacggagacatcgaggaagagcttcgcaacgaacgagaggcatactacgcgttactagaaatgccagaggttgacgaagacgacgatgatgcgagtgacgacggatctgaagacgaaacgcaaacagggtcaaaaaagcgcaaatcctggtcaggtcgcgaagacgatgaagattcagaaggcgatgagccgcctcaccaacggaggagaagcaattcagtaggttttaacatttttatgatccgacaatggactaatgcgtgatatagggctcctttattgactcgtctcccactcgccgcaaaaagactggaatcaattcttcgaactcgtcacgatctgtgacaccgacaactgactcgccatcaccagctgaggcaaaacaaccctcggcgcggtcattaaagaaacgtctaattaatctcaagcgaagacacgactccgttctacaagcctactattcgtctggaacttcatactccgaaccgatttcatccctgatctactctctggcatctgagcttggacgagatgacaatgacctgttgtggcttgctattgtcggtgtctccagtctagaactcagcggtcggacaatgaccggagtgggtatttcaaacacatcagaatcaggaggctcagcaggctggggtggccaacgtggtgaacacatccgtcaaatacttcgcgatgaggtgcaccgtttgaacccgcctgatcctttagaattcaaccgtgacattcgaggagagatcaacggtgtcattccaacaaccgctagatcacccaccgatacgtcgattcgtctttctcctgaaccccgattccttcttgtcaggcactggtcactatacgagagtatgctgcacagtccctatcttgcgccaaggctgcatgtatggactgagaatggccgcaaacgactgcacaaacttctggccaagatgggaattagtctgacccagtgtcaccaatactatacccacatggacatggaattgaagcgtgtactacgatcacggctgctcaagtacgcccctatgtatggcttagacggactcgtaccatcagcgggatctaccagtgcgagtgcccgtgagggctggggatttgtgcgttgctggggctggaaggcttgcctctctgccacagacgtaggtgttattgtgggtgcgatgctggaagttgggccacatgagactttggcttcctgggacgccaaacgtctgccacgagtgcgtgatgatgcagagaacagtggaatcacaggcgcatctgacttggccagtctgctgcctcggttctggagtgcctatgatgcgctttcactaacatccgaatcacccacgattcttctagagtctctgcccctcgcccaacacctacaccgtgctatccttcgcaccggtacctccctgctctctaaacatcaaatccgtcaccttcgagcattccgcattgctgtggttaaggatggacccgacgtcaaactcttcaccaaccctggggccttgacgaaattggccctgtggatcgccgaggccattcgagtccaagaaaaagagcggggggactcaatcaagatcggtcgcaagagggcagcgggaactcctctcgtccttgctggtctcgacgaagatcgcgatctctatgtcgtcgttggtactggtggcggcggcggcgttgttgacttcgctgccatgtccaagcgccaagaggaacgcaagaagaagaaggaagataaggagaagaaacagaaagagcgatcagagcgccggtccaagcgagcaacagagcgtgccgagcgagaagacgagactggtgccgaagactcagattcagaggaatctgagtcttcatcggaatcggagtccgaggacgaggaagatccgcgtggaaagaagcatcttctccgcaaccggtttggcattgccttccaggaggtagtccaggagacgaacgcccgtgtgcgaatcgacagcttcgagcattgtgttgtcgaggtccagaaggatgaccttggcggcttcctcgaagcattgagtttccgcagtgtggtaggctaaataccctctacgatcaatcacgcagtctacgacctgtcatctttgtttactttcttcgatgcatggggtgggagggatatatgggaggggatactggactttgaaaccggctacatgcataatgaccgttgcatgggtttccacgcttgcgagcattcaaacgcccttcattcttgcatctgtttccaatggcgtttatggtgtttcttgttccgtgaggaaaacatgtctgattctatctagtccatagttgcatcgaatctatgtattttcgaccttccgagagctgattattggatgcttctcatatagaataatcgagttattgcaatacttggaataatacatacaatttgctggtgtcaggttcgtaataatagcgtatcatctgacaccgttcgcaaagtaggagcacatcaatctcattccgagacatcacatcatcgtggttctttcacagagctgttcttttacccccaccagaagttcacgctaatcccagccctcagcccacgcacatagtgccaccacccaacaggaatgtagagacactcgccttccttaagaacagtctccacataatcggcgtccatgaacccaggccacatctcctcccatttctcatattcaacaggggaagtctcgatagccgccaggtccaccttggaagtgttggacatgtcaaccgatctacgagtggttggcagagccccggatacaggatctggctctgccgtctcatcaatagacgtgacccattcttggccccgtgggtggatctgagagtcaggcgtgtgtggcgagtacagccggatgtacttggtgcccacgacctgcgcgaggatattgtggtgggggtcgtggtggagaggggagatcgtccacaccggtccgatccaggtgttgataattgggtcgctggggacacccatgagcgagcctgcatctgagttgtgttcgtctatgacatgctcccttggtgctgtgtccaactgggggccatgcgaggtttcaggaacctgtgcttgaactttagcctcacgctctcgctgtttcttctcatacactggtgttcccggatctggacctggtggagtgatatagcagtagtctggtacactgatgtcgttacgcaaggcggggatttgagtaagtagatcgtgttgtgccatgtatgctgtctccccatcgaggttagtgacctggggctggttttccggcgcctcagccggagctaattttccttgccatatgtacttgtccacaaactctttgaatggcatgatcttctgtccccagtcctcgtcggtatacgaccttcccacctcaacggggaccaatcggcgacccccaaacgtgcggtcccaccagtagttgcgcgacgaccatggacgcgtcgaaatggctggccagtgttcaattgcatcttgtatcaccagtggggtgcggttgttttgaatgtgatgttcgatggaatcgaatgagggcgccgatatacgcgggatcggatggtccagatggggttcacggatcgcatttggagggaagagaggcggcgagaattttctgcgtttcgcaattggatactccggaccatcagtttcgtcgtattcgaatttatgggattccgtagctgcctgcagcgtggacaatagggattcgaccagcttctcgcggaggggggctccagacatgatcaggacgttatccaggatcgccacgacatctgatagccatggcgtgtcgggggagagcttcggctcagttgcattctttatgtcttgaatgagttgtgagacaactaggtgctggttttcaatggagatcaggccgcattttgtgatgatgatgacgcaggccttgacgatagacgcgtccgtgtagagtcgatgccagcagatgtgcacatccttgaatggaaaggagtgcagttttgagttggcgagctcaaatgctttctcagtgtcgttgaagagaagatcttgaagttcagggttgtcgcattggagaattgggtcgtcagagctcggcttggcgataacggacaacgcgtcactgaggactgataaaagggccatgactgagggggaggtgcaggagaaagcgagaacggaaggaaagaaagaggtgagctagaaattatccccaatgtcctccctaagtgtccccaaggtatggtgttgtggtggattcgagttcctcctaccgcgttcaaaatatatcccagaccctcatttgggcagtcaaatggagaaagaaatgaataccctattttttctatgtcatttaatacattagagctaggaggttgcctagataggatgaaactaaacccaggcatatgagagcttagattgcagagggatgttgaaggtatattgattttattatatagtacattttgttcaagatcaagggagttttctaatatacacgctttattcgagaagctccatcaccagtttaggaattcgagacaccccttcgcctcttttggcactgaccggaacaacacacactttctccttccaagcgcgttcatgacccgaggggtgctcaatcgagccattctgaacaccagacaagtactcctgcagagctcggaattggtcttgtgtgttttccaggtctgccttggttgccacgacaaaccaaggcttcaaatgcagaggtgtcatcaccagcggaggcagcgagccgtcggggttggtattcaagatgggggcgggctctcggtcaagtatctgtcgccgatggccaccatcctcagtttcattgaatggattccattcaatgatgtcgtcttcctcagattcgggatctgcatcgcgcattcgctcgtactctccaagttcgcgccacagtttctggagttcctctacaggatcgccgttgctgagatcaaccacaaaggcaagaatcccagctcggtcgatgtgccgaaggaaccccagcccaagtcctcggtcgagatgggcgccttccaccagacccggaatgtccgcaatagtgaagtgtgtgcgacggaccttcgactcaacaagaggacgacccttcatgtcgtcggtgatcacagtaccaatactgggggaaagtgtcgtgaactcccagtttccaatgcgagtccgactgttggtcaacgagcgaaggagcgtactcttgccggcgtttggtttcccaaccaatccgacatctgcaaggagcttgagctcaaagtcgagttccaacatcattccaccttcacctcgacttgcgaactttggtcgtcccattacgcgtgtggagaagtgcggattgcccagcccgccaataccaccggcagccagaagcatgggtttatccataggttttgaaagatccagccaaatcggtgccttgggttccatggctgctatattctgtcgtcgcgggtatgatttcggaaattggaccataagaaaatcagacggctttgcggcggggtgtagtacccagcgatcgtgctggatagggttgaactcgtcctcttctgtttcttcaaacccttcaccttcgccttcatcttcaccttcaatttcagaatcactaggagcccgccacacctttttctcctctttagcaatataggccgcttcttctgcggccttgatgcgcgcccactccacctcgaccggatcataacggctcacctcccgcaccacggtgccgacaggcacctgaaggaggacgtcatcgcctcgttttccacccttacttttaccctgtccgtttcgtcctctgctagctctgataatgcctctgcgggccagcttgtgaagactagtcaagccctcgacagtctggatgtagataccgcctccgctgccaccgtcgccgccgttcggaggtccctcttcgacgtatttctcgcgcaggtaggcgacacagccatgtccaccagatccagcatgtattttcacccggcatttgtcttggaaaatgaaccgcgaataatcctccggagaaggatccagatgcgacaggtctggttttacctcgtcagatacggcattttggctaggctgaggtggtgtttcggggtcggccttggtgctctgaaatcggttccgtgcgacgcaaggtttttgaaggtctcgtaggaataatcggctgcaacgggcttgtcttggaaggaatggtcgtatgggaagggaaaaatagactcgtgcatgcgccatgatgtgtgattggcggctatttctcgctcattctgtgaatgcagttcttgcaacttttgaaatagttcaagtcaagattagatcttcatagggcgcagatataccggttttctgtgaattgtcaacagagtgagttatgacttcagcggatttctcaatgtcccgataagatcacatgatgataagccatttatagtctccccaatgggtgcagaatatatggccataccttaaagttactcctttttaatccaattttcccatttttgcgaatccaaaaagggctgtgtaaataacatgccgctgatcagactcgatattcagaaggatttgccaaggaaaaacgagctgttcaaaacaatgcccaactctgcatctaaccgttcgcttgccacctcatcaacccatattatgagaagccgtcgggtttccacatctgatccgtagggtcaaaacaagtacagagtactttgctgcatctgcaagttgccgctgtgactccccgatctcgtgagaaagtgaccaataaacagatgcggattttacttgaatagactagctcaattttaatcctgtctgattgcgactcgactctttgtctagctttccctaatgttgagtcgctgacatgcagcggaggagagtaaaatacgtaacggtctgttgcctttgtttggtttaatactgtactgttatttgctttttcaacctgctgagattaggaagatagcagcttatgttggcggagaaccttgggaactatcaatgcatccatagatcactagcatgaccattactcaggggctgatcatcaactttgacgttatgacgacttgacttctcctatatttcacagccggctcaaattaatacacgaaagctttcgcaacagtcacaagtgggagaacccaaggcgcagcactctagtccggacggaatcaacaaggatatagatgcttctgattatgtccttgtctcggctagctgaactctttggttttgtttttgtgttcttaccaggcgtgttttacatggattcggtgtatccttgtttttattggatgtgtttaccttgctccaactgtccggtgctccttttttttttgagagtttctttctgatagctttatacaaatcagtgcctaatattgactggaatggggattacccttatacacaattcctcgggtatattatctgctcggggaatggctttctatcaattagttttcatcgaacttgactaaacaattatatgatctaggacggctctaaaatatattttgaattgccctaagaatgtactaacacaccgatttcatgttgccttggtctatatcgacataattattacactcaagcaagcacatacccgagtctacaatgtctttattcatgcgggaaaactcatgcaattaagtgaaaagtaggcggaaggcgagatacatggacgtacgtatatcatgcgcaacgtcggtagataacagtatgtagtactcgaaaatggcaagcgacataaattaagacataggcagatcgataataacaaactatgcagcggagagagattatgagagatgatttggaatttgagatttgagattaaagccaattccaaaacgggataggatcacacctctgcagtatcaagtacccgtgtagtggatatatcatagaggctgcattctcggtgttgaaaggtccgatggccctagctctaatgtcaattttagcacaggcaggaatctgtgacccgctgtcacatttatagcgtgattatggcaactgcagaagcgggaatcgtgttcaacagtgagatcaatcaacctatgagcaagagtgaacttattgtgaagagcggtctctggcattttctaggtttcttccactcaggggcgtgaaattcgctatatggcatgatccgagagatatgaagtgaaaataaagatatgggcatcagacgaaaacttgcccacagtactgtgcataagaagattccacaatttttcgaccaatcagagtaccatcaccatactctcaggagcaagagagggaagctgacagactagagagacgccagggaaagaacccaccagaaccgagcctcaaggcgatcagatcttggctccggggcgagcaaaagtactacatggggaagtctgctgtacttttgctaagaggtttagcactaagatcatgcgtctgtacggagccgttcgtatctggactctatctagatatgatcggtggcggtaatttttaggggttcgtccaattcggtaaactttacgagtatacgaagtagtctttggtactaattgatattgtattgaatgatctttgaggaattgtcttttagtactccgtagttagttaactacttaactatatgtcacgatatatgcatggacaacttgtttttatagacctgtgacctgtgaggctatgtattgtaccaccctctaggtatcattctgctgtttgcgtgggctaattatttgtatgaaatttctctggagtaatattcagatggctgagcaatcgaagtattaaactcccagctcgtcaaggacgcgcaagcggcgactaggtttgtgtattggctacttgggaaataatgatacgcaattcaaaaggagttattgctcgaagtctagatccaataaccagattttcatttaactagtatcaggtaggacgacaagttctgctcacggtagttatcgtatgttggccaagctataaatgggttgaaggtgggatgttggataatcgacaagataccaggcaggtgatcttgagtgataccattgagcttcaattggtttccagtaagaccacacgtgactgcaatgaactcaacattctgtgcctagactcctgcaggggaatcgatctcgatcacatcgcaaagtctagagtacatgaagtaaggcgggaagtacgtaagaagtgtatagatccagctgaccaaaagtccacggaattcagctccccggtaccttgcggggcaaaaagaaatcaataaaaaacgggaagaagaacaggaatgttcgcgagtagaatcgatagtgtgaaaatccttgcgaaaatacggagtacgagatgtgattcggatccactcgcggaacttttgcactgtacccgtcaccgcggcaccggatccctgctttccgcttgccacaagtgcggatgagggcgatcgttcctgttggtcacggaaatagaaaaaaaaagagaaaaaaagagatcggatggtaatatgggtacttcttacaataccaatccattctttacattagcccctctttgggaggaacctcgggagacactaatgtactccatatatccttaacttagtagtaccgtggaactggatctgtaagttccatggtttgtctagcggggaccccgaggtggaaggcgatttggagattttattggaccgcggacatcccgctcagctgccggaccagaggattcagctttcctcgggacgcacctctggaatgaaaaaccttggaagacacgcaaggcagctgggcaatcttaatctccaaggctaggttccgatcttgcctgtcagaattcgtacgtatgcatcatgcatgggttcggatacgccttgccggttcacaaaagtacacctgtcacttatactccatgcagctcctcgacaacctttagaaattagaatttcaatcttccccaaacttccgagatctaaagctaagccataaatctagatcggaaatgcagatgtggggtttagctggtacgaccagtccaaacaattaagttgaagattcagctatccatgatatattgtagtctatagtacgttgtacgtatacactcttcaaccctaccaagtaaggtcccactagtgtctagaatcaagggtagccgacatggataccgatctctagaaagagacagctaaacaaaccgtgtaaccgatcgccgcaaggttctggatcgggagtcgaggaagtaaatcgcattgaagcaattaaactcaaaccttcttgctcggtcgatcgggtagactgcatgaagctatgagttcccgtctcaaatgcatatacgtatgtactccatactccatactccatatattgtacggagtactccgtacacatcccaaggacggcacgaccggtggcggcttattaaaatagcaaggaataggaatggagcctgttttgctcggagttaaaccggcatgtatccgaatctacgtagcgggatcacacctctgaaaacaatgggattagactgatctgcaatgtatgttgtacatcgcctacattgatatgtatacacccttgtacaacatcgggagggatatgttggaatccttgtttttgcccgtcagcatagtgtgtagccccttttccatcgaatttgccatcgaagatctagactttgaatgacggaatccggcccacgggagtgactccaaaagttgatacatcacacaactgagttttcttcctcatcgcgggacagaaagggaagccgcacccagcaattttgccggagatctccgccaaatttgggacaggtccaaaatgaagccttcctatatgccggaagaagtttccattttgccggaattatttttcttctttgattggtttgtttgtttggggtttgagggggggcaatcggcgccacgcttcagccgttcgggaatctcgcgactgtcagaacccgacaatttggtgcggcgttctgtgtggatcatggacccttctgtctagattgggattgtttagcgtctgcaaaaaatttgtcacaaccgactgatctatccgaaaacggggctgtattcttaggggcatcgtatctcgccaaatgctacggagtactccgtataggttcgtggtaatcagatccgtggggcggcgccgacaagccccggtcatcgttgctgtggcggtcctcagggcgggactgtacgatcgatctaggtgtcgtggctgtgcaatagacgaggtatagtttgatagtgtgccgtggaggttgaatccacccccttgctattggtctcgatcgggaagtgttgaggtattattccgctgtgatgcaatatcttgctcactttggaatgaaggaaatatcaagggcaacagatggaatgtggtgaagatggttcatgacctcatgtgaaattaagcacggatcgaccccgacatcgcagtacatatgtacgttcggtcgaagctgtgaccaagtactagtagggcacggcgagatctcggcaaatctactctacggcgttatcaacatcatcctggataagtcggtgtcgtcaagcatggcttccaactgtgcgtgttgacttgtaacgcttcaccgtctttttcgaggcttcttgatttcgagtcaaaacgacgcggaggtctggatatcaatatgggctacatgcgcaatgtcggtccatatcgcaatcctcgacgatcatagttggacagtttaccggcggtgcagactcaaatggcggggcagaacaatacccatgtagggctcagcctaccacgggatcacaggaacgagtacggagtatccgagggagaattcaaggcaagacgtcaaagcatctctgcagataatcaacaggatgcagccaagagacacaccgcttgacaccggttaatatcagaccttgtcaatgcagactcacttgatctatgtccccctctctttccaaattggcgagaatcggaagaataaccttgcaggggttccttttcccccaccttacatggatgattcggttggctgcagggtaggaaaatcaaagactcacatgatctccatcccgatttgaatcgcaatatgtatgaaacaaagagaacagcaagcactaatttccgaccgttgggtcgcaattcttcttccgaacagtccgaatggatttcgaggtagacacgactgtcgctgacggagctacggcaggcacagtcgcgtgatgcatggcatggaaagatgacgggctttgtttcctgaatagcagtcaccgctatatccgcgttgaaataggtcgggctctgttagggttgggttgcgactcgcggactggacatttcaacgatttagttgcaagcgctcccaccttgtagccaatgacctctctggataggaatgcatgcattgggatcgacatatctgggtatttcatgcatagacggattggtcaaacaccctgtcagacctcactaggagcttgtattagcccattgtcagctgggcacggtcacctctgctttctaatcgaatgactctttttattgagcaatatcaccggcattctgtatgactggttgttgaaaaaaagtcaagagaagtgttgcatgttgcaggagccgccccagtcgggtttacaatgtcttgctcacaccgttccttgactttcctcctttggcatctcctacaaggcgcacccctgagaggctctagccgctaatacttgagtatgacgttgtagtttatttatttttttttcctttcgagttagatgatttctcaccggctttttatccactccctcgcgtggccccagataatttctgtcgtacagcaagaatcgaactagcgcatctcgtttctcccactatattatactccatatatcaagtacatatgcacctccaacagacaacatatattcgaatacaaatggtcccacttattcccaaccccttgggtcttatgcaggcccttcttgttgggtcggcactgtaccgactttggatagatcccatttgtgtcaacagatcgaaagtcaaaaggaccggagtaatagatagccagaatgtaccagcggaattacggttcagtaatccgctccacttcgccacaatggctgatatagttataagggggagaaaggggcggcattgttttcccctgttgccgatcgacgcctaacggccaatagatggggctcgggagtgtcggtgaatttctgacaagctcagctgattctccggaggcttctcgaaggtctcagaagccgtaatccacattacagtggctacggacgagattatttctactagtacggtgtgtatattgtaattcgacgccaagatgatcatcggatctccgagggtttcaatagcttctctttctatactgcttccaactccataggctccatctgtaccgggatggcgggattcgcgagaaacgctctggggagttgaaaacggcttttactgcggacatgcaacaatgcgacaatagacggcacggcgctcgagatgggctagagtttccctttcagctggtacattcgtacaccgcattttattcctagtatatcctaaacatggttgacctacatgtatgtttcgacccaatcagctggttccgaccttattagaaaagtacgcttctcctgatcatcccggccatctgggaagagtggataacatgttaggtttccgttgagtggagagtatgacgatgtgatgtttggtctcagtttcggagtacgaagcacatttacaattatagagagggtaaaaatcctgaaattaaattatttaattaaagaaccattttcaagtctacctggcaagtccggaactagttcaagcataggttctcggggagagacaccgcggagctatagggcgagatctatcatctcactattttgacactaaaccacagctctgggtacaaccaagtcgatcttccttaccttacgccatacgggtgaagtatcgtttagcgcccctcgactaataggcctaatgccgttccccgggagcccggcgctcaggaccgtgggtctcgacatcattttggtatgtatcagtcttgctcgttggatctgggggaatggatctgtcgaatcaaaggtgtggaaactctgtttttcctttttaattcgtttatattacctccgatctgattaatcgctatcagaatcccatttttaatttcttttccctttagaattcgcccggaagaacactacctttccccccgatggccaaaatgtaaataaaataagtccaatccctaaaagaatgacgctggaccgatatcttcctattggccctaacccctttccttacctccggggggattcttccgcttccccctgctctgcttaacggaaatgtcaggtttcgacctcagatccactaaataggataaagggttttcttttttattaaacggaaatcaaatcgaaaataaaacaaaaacacattaattacaataataaagaaatctgacccacttcgttcgtctttatcctgaatgtttgccaactgcatcctgtacagctgtaaccgaaatctctagttgtgatgctgaacggttgacgttttagttctttggcgcctgatcacttctatagacctatccactgtcaggacttcttattataatagcctcccctttcccggtcttttctttccctactctcttctaactactcttgacatctttcctcctccattgggtttatagatcctctccttcagcctcctcttgtcaatcttctctataaactccccggactcccttgccgctgtctcatacgcacatcgtccctgccttattggatcttgatagaatttaccgcagggggagcaatgctgaagccctaaaccgaaaagacgctgctccttgctccaaccacactagcacattctctcccttggcgactctggggaaattaagcaaacaaaagcacctttttatctggtactttgttcctgcttttcgtcttttttttctgagctatacactcttaaagggaagtggggtgtctttgagcctctgaaatcctttggtctgcttccagctcatttcgaccttctcacctcttctctctcgacttcacaatgtttcaactaccagcctgtttacagggccgacgctctcgcaatggctcgggcgataacttctctacattcccaattcggcaactattcatcttaggtaagtttggtacttttgttctgatctatgaaaaaaaaaagatatggtagccgcaaattcgccgcaaaccatatctatacacaatgagttcaatttctgacaaaggcaacagcactcgtccggatctgtgaaccaattgctttcatgtcaattttcccatacgtgtatcacatggtcgaatcattccatgtgacggataacgaccgtcaaatcgccctgtacgccggcatgatcacctcctcattcacttttgctgaattttcggcgggcatgttctggggccgcatgagtgaccggattggtcgtaagccagtcctcatcatgggcctcgtgggcacggccatcagcatggtggtattcggatttgcgcccaacctggccacggcgatgattgcgcgagcactgggcggcatgctgaacggcaacatcggagttctccagacgacggttgcggagattgtgaccaagaaagagcatcagccacgagcttattcgattatgcctttcgtgtggtgtcttggatcgatcattggaccggctatgggcggcgctttggcccagccctgcgacaactacccggccctcttcgctcgcagtacgctgtgggataaattcccgttcctgctgcccaacctcgtctgcatcaccgtgctgatttgcggcatcgtggtcggtttcttgtttttggaggagacgcacccggagaagaagcaccgtcgtgatcccggtctcgagctcggccactggttggtcaatctgtgctggggctcgcgcgtgcagcttcccgataattccgatgtggacgtcaaggagaagtacttcgacgatgcacctcctggatacgaaaccgccgaatcatcgccttgcctgcgtcccgtcgatgacggcgcatcggctgattgtgacttggagggacagaagagccccgcgcccaaggcatttacccgacaagtcgtccttgctatcgttgcttacggcattcttgcatagtgagttggcccccttccccgctctaagccacacccttctgcccaatacgtttgaatgatttactgacctgcattgccctatttcagccacagtgtctcctttgatcagctgatgccggtcttattgagcaccccacgatccgatgacgaggtagtcctacccctcaagtttaccggaggcctgggaatggccacgaagaccattggtttcatgctcgctgtgcaaggagtgtactcgatgatcgcccaactgtggctgtttccatttgtcgtcaagcactttggtactttgcgcaccttccgcttcgttttgcttgcatggccccctctctacctggctgtaccctacctggtccttcttccggccaagttccaagtgcttgccgtctatgtctccttgatcagcaagatcacattccatgtgatcgccttcccggccaccgccatcctgttggccaatgccgccccgtcttccaaagtgctgggatctatcaacggcgttgccgcctccactgccagtctcagccgggcgtttggtcccaccatcactggtctgcttcactccaagggtcttggtagtggatactccgtgctggcctggtgggcctgcggtcttgtctgcctaatcggcgccatccaaagtttctggatggaggaatctccggaacctgagcgcttcaagactcgtcagcccgaggtcagcgaatccgagatgaagcgtgaagccatcccggacttcagcaaccaggctgaggactctgacgagctcccagaggaagagcagcggttgctttccttgcgttctagtgtcgaccatgactttgacattacggaactcaacttgaacaccgtcgataacttccccaagcctcaaggcgatctcacccacgataccaacgtttaaaactgcgaagcttgcatattttgcagcaccaccttttactttcttccatgcttctggaaggcatattcatttcagcgctaaggcgcaacgcggttttcttttttgtcacttttttcttttccccgtcatcacgatacctcactctgctatttcattctcatgactttgagaccgggaaacggcgcaattatagatggttgcattgcgtatgctgaagcataaaattttgggtctcttcttttctttcatgttatcttggagcatcaacaggttatattatgactattcatgtgcatctgggaggttattttgttattttgttcttcgatctgtgttctctcgaatatcatgtctctgtcggttagagtatcttgctacagactgctcaattaacggccgtcatcttctctatcaactttgatcattttctagccatgtagtctcatagtttcatgcctcctagcctgtttcactccttcttgcgctatattctagacaatggtttcactacaggctagcatatgttttccgacggtgtccggtcgattaagcaattactccttaatattgacaagatcatacggccagcatgttttataaatccccccctccccgctgttctccccccgctctcatccccctcatgtccaatgccttgtcgtaaacctgacagcggggagtgggggaggtccaccaaatctccctagatgaagctatatcagattcaatcttcattcttcaaacaaaggtcccgtcaaagtctcatcgaactcccatcaaagtccgataaagtccatcaagtccatcaaagtccgattggagtccgattagatctcggcatgtcagagcctgggaaacccgagatctcttcccggggtaactcaatttcccaactccgccaatacactctgactatggtttcttctcttcctcatattctcacaggtctcgtctatggtcgcgtgttgcaattatttgctcggaggataatctaattccgaggtttccgttttggggccaatctcttttccattcgatttgacacgattggcgcgattggcacgataaatctccaatcaccgaacgaaacatagacgaacactaaaggtatttcgtggtcttatcatgttgatctgctctgggggagttaaatcgcagttcccgaccattgtccccgcaaaactccaccaagagatgatcgcgactctgcggctctcgtctctcggttctcacaatgcctaaccctccctcgccgctatcaccagtctcttcaggcaagaagagaccacatccctccaatacccccccagcccaaactgaccccgcgacgaattctgcttccaatctctccgccccgacagcggtgccctccacctcgcccgcccattccatcgtccccgcctcgtctgcttcctcctcattccgcaatgtctccgcctgtaaccgttgtcgactgcgcaaaaatcgctgcgaccagcgcctcccgcgctgtcagtcatgtgagaaggccggcgtgcgctgcgtcggatacgacccaatcacaaagcgggagatcccccgcagctatgtctatttcctggaggcacgcgtagcacatctcgaaaaacaattagcggataacaacattgaaattaagaaggtcgtcgctttcgacgaggaggaggctatcaagctcgaagctgatggcgacgccgcgcaacctcgtcccggctcggacggccaggctggggaggggtctgcagcggagaaagcacagtggaggaatacatcgaaagaaaatgccggtcgactagagcggagaggagaggggggtaatcgtgacgcggacgatgatcctgcgaatgaggataattggcgcctgcataatctggtctcgaatatcggtatggtctctgtacagggtacttccgacccgcgttatctggggtcaacatcgggaatctcgtttgcccgtgtcgtcttcgctgcggtaaggagctcactacccggtaatataccggaccgtgcgattcgaacgagcgatcgattgccccagagtgctgcgggcactgctgggggtgggggtagtatgcgcgattccttcttcggactgcagacaaggccgatgatgaaatgcgcgactttccctgaccgggagctggctgaacggctggtcgatctttactttgaacacgcgaatcctcagatgccgattctccaccggggagatttcatggagctgttggataagacttacttgttagaggagaaaaagcgttctccacgcgcgctttatgtgcttaatatcgtgtttgctatcggtgctggcatcatctttgaggataagcctcaaagctcggatgatgagagtcgcagtagtcgtgaacggccctcgtctgggacgaagagaccgagactctcgagccatcagtaccagccggaggaataccatgcctcggcaatcattcatttggaatcattccttggttcgtcctctagcgagggctttggtggattggaagagctgcaggcagtgctccttctagccagctttgccctattacgacctgttgcgccgggtctctggtacatcgtcggtgtggccatgcgcttagccgtcgaccttggacttcattacgaggacggagcgggcattgactctgcaacgaaagacggcaaccaagcgcagtcacggatcgatgctcgtgaacgcggccgtcgtgaatgggtgcgcgatatccgtcgccggttgtggtggtgcgtctacagctttgatcgtctggtagctacgtgtgtgggacggccattcggcatcagcgatcaggccatcagcacagagttcccgtctatgatggacgacaaatacattaccaagtcgggtcttttaacaccgccggacggagcctcgacatataagcatgtcgcattccactacttcaaactacgtctgcttcaatccgagatccacgatgtcctccaataccaacaggcgcgcgctgtgcggaggagaggcgccggtgcagttattctcccgcacgccgagctttcctcccctttccttcagggctttgactcgttccgctcgtggcgttatgatgtgcatcgccggttggttgagtggcaagatactgccccgacacggccggaaacaggcgtgaggttctccattgagctgcttgagttgaattactggcaagctatcattttgctgtaccagcagagcttgacggttccggctgaattggtgggagagctgactcctgcggacgacgtttctagtccgtccttttctaatcctgatgaaggtgaagatgaggatcaagtctatcttaatgttgccgaggctggtcagaaggtcattcgtatctatcgccaattgcacagagtacgcttggtgaattacacctatctcgccacgcatcatattttcatggctggtatgctgttgttctttgcatttctttgcttcattactgacactcttatcaggaatctccttcttatatgccatttggcattcgcctttggttcgaagccgcttagtaggtccaacttgggatttaggtttatacttattctaactttgcctttcttagacccttgatgaagtcgactttactgttctcgcggcaacttctgttcttggcgatctgatgcacaaatgcccaccggctgaagcatgccgagatgcgttcgagcgcatgagcaaagcaaccgttcaaatgtgtttatctacaaccggattcggatcacaagtagacatcagccgtgtccacgccacatcaaacagcagcagctcactgcatcccggccggccgcgacagcatatggatcaacgacaccgcgcaggccaagggcaaatccgacgagcgactccggcacgcccgtcccgccccgtccccaagttcgatatgaacttagcagacctgttcaccgataatacccccttaaccgaccatacccgatctgaaaatagacccgcagggccatcctaccctcctcaagaatcggtagcccccaacttcacagcagaccagtcttcccggtcttatggacagcgcaatccgtcgatggattactatcccaagtacgagaatccaagctccccacaaccccacccgcagttttactacgcgaactcgccgcaacaaagtgcctcccccggtagcaatacccacggtcatgctttgccgcctgccgagactgagactccgcaagggatgagtcttgatttcttggattttgcgtcgggcgatgccgaaggccacggtaatatggaaggcgaagccaatcctgattacaatactatggctgcaccatccttgggtcacaacctgggccagaatgttgggattgatcttggctttggtatggctatggatttccagcatgactggagtgagaatcccaattacgatcttttggagggctatttctttggtggctctggggctggcgcatctggaggggatgtctaggatgtctgttgttccggttcatttcttttgtttggtgtcttctctcgcatttctttcatccccctaccctgcctctttcttgtcaccttttccccaaagacctgggcttagcaagggttgtataattcggcctgtgatttttcttttttcctgcttttggataccatctagacacatatataccgatttacgaacatctgcaaggacaggaaataattaattctagggttaacaatagcatcgagaattatatagtatgttgtagttgccttgcattgctatgttgcttgcctcgggcagcaacggcgtcaaaacaaacactcccgcctttattttttttctcccaacaacacaattcctgcaatgctctccactcagtcatcgtggcactcaccgcacaaaagaactctgtagccctgttggctgcttcacttcgatttgcgcttggacccgactgcctgacctcgacatcaggtgcccacttcgatcatcgattttctattcaaatcacctacccccgcttcactcccccggtctcgctgaaaaagacctccaatcgccacaaacccgaagagcaaactccgaactgtttctcccaagccgagctctgactagcgtttttgaagtggaccctgcggcaaaccgagaccgcggagcatataaggaggctctgccctttccttttttttttttcccactgaactgaatattgcagcatttggcaacatttgacgactgaggctttgattttgctagggttacaagacattgcattcgtttttgttctgcttagtcctgttcaaaaggtcctgattgcgtgcaacgtgctctttacgatttaccttatccttgggcttaccttctatgactggacatgcgtgggaccgccgattatttacttgaacaccgactatgcaattcgagcctgttataactgcataagttcgccggaaatacacgaacaatatggcgaaatcagacgtgcgcaaagattactatgcggaccttgggctccagcccagcgcggaggctgaagacatcaagaggcaattcaggaaattaggtgggtttcgcgaagctatgttttgaagtgataattggggctattgctaattgagagggaaagcactcaagtaccacccagacaggaacccaggacgagaagtcgagttcaacgccaaattccaggccatccaggccgccaatgagatccttagtgacccctcgcaacgactgaaatatgacaccgatcgtttacgcgcaggatatggcaagtgctacggaccgcccaaggctaatacccagcgcaaaacacaaacccccacctatcctcctcgccctacgccagccccggcgtctgcaaactcgtacacaaagccggccccgactaccccgtcggctggcgctcgacgatacgcatctcatgcgcgtgccggcccgcaacaattcaaacaacaggacaatgcgcaaacaagggctgatgctttccatggctttaataatatgagaggaggacaggcagctggatggcagggcttcgatccttccactgggcgtgccactggtggtgtcccaggtcctggggcacagcgtcatccctttggaacctccgcgcagtctacccgtcccaagtctgccttcgaggctcacaactctcattccaacgcacagtctttcaagaagaagcagggctttgcgccaggggccgctggaggggacgagccgatggcccgcaacacctccgcctatagcagcaacagggctgaacggatgagcagccaatactttaagtctgctgtgcccccaactgcgaagaaaccagtatcacctgagccgcctcaacccaaatcacgccattcatacaccccggagttcgaacgacccagcagaagctatgcccaggcaggcaagggtgagaggactttcttctcaagcactggattaggacgttccgcgaccacgcgtaccccctcaggttcttcccatcaaaacgcccatacaggtaaagccagccctccctctggccggtctgggagataccgtagcgctagcccctcgcccaggcggaatgccaataactatgactctaccagctcgagtgaaggggaacagcctaggcccaaacccaaagctgtgccaaagagtcgactcgggccgcatcagaagtttaccgacttctacaacccaggaacagcaagtcccagaaatggtatggacttcaactccttccttagcgcaaatgggcttcgaaccgttcagctaccagatggtagctacgaactccattcgatgcctcggaatcccctctttaatcaacgtacccttgctgacaacaacggacccaaaggacacacctcggatagcgctgctttcccaaaaagctcgtatcggccggaccagcaatctactccatctggttcttcctcttctgtcaagtacgttaggtacacctattatcaagttgcttcgcgttatctgacggacaccggaattagcactgacccggcaaacaatcccaagaggccccagcccgccgcgtatggacggagcagcacaagtgatttgcacaagaagttctctgctgatgattggcgggatcatttttgtcagttcgatttcttgggctctgcctcgccaaacaaggattcactgcccagatcgcctgcctcgcagaatcggggccgtacaaacttccggaccggaacggctcagacatcagcaactggatcgccgattccaaatcctttcggtcctactcctctatatcaaacttcacagtcatcacagcaagagcaaccaccaacgccctttgcacaggcaaagttttctgcagattcatgggctgaacagcttcggaacctctcgtggaatgtaccagaggtcgagaaagccaaacaaacggcaaacgctgcgccgtctcgtagtccaaacaaacagcctagaacaggcatcaaattgcggaccgctccgcagcaggcaagtgttgctactgaagcagatgaagctaaagaaaccctgaatggccagacttctgggccagccgagacagcagcaccggacgttgaggagatggatatcgacgaggaccttcctactcagaatattccgccgagggccccagttgagaaaccaagcagtggtagctatcccgatgtggcttttcaggctgcaccagatgcgccaccagtcaagaagtccaagcttccttcgggcacagaagcccgcacccctctatttaacctcgagaatcttcgcaataccgtaccattcaccaatacaactggcggaggcatcgagaacctagaagacatccacactactctccccttcgaatcccaagccaagcagcaaaggaccacaagagatgacatccgccctcgcacactccaacttccaaacccacccaagcgaccctgggccccgaaaccagtcctcctggccccgacctccaagcaactcgtcctcccgcgggataaatggaactggtatgtctcagcaatgggagcgtacatgcatgaatggaatgcattcaactgccgcatactcacgcatttcaatgcgcgccaagacgcgaacgaaaccggtctttcgccgggctggatcggtgccttcggagactctacccgtctcaaaataaacggcgcagacgacgacagcaacgagggcacgacaaagacccgtaaagatcttgatgattatcacgttgacgaattcctcatccctggtaccagtaagggcggctttagtgcttatctccgtggcattgaggaggatatccaggtgcgcaagcattgggaagttgcctgtgagctgcatcgggaatgtatccttgatcttggacgattgagggagtggatccgggatggcggcaaggtggtttgagttttatcactgaatgttcatggtaaatggaaagccattgctgaagctgcatctacgttgcatcttcagcttaaatattgggaggctcttctccgatttgatctgacctgtttcctgcagtttggcgtctccgttcttctttcttttttcacttctattgatgtcttctacatgcctttttgatctctctctcttttgcgatgcataatgacttggtgttgttgtgaatacccgggattttatcacatctgcatagatttgcctgactctttcatcgggctctattattatcggtgttttctctcatggagttgttgaagcgggatttgtactaggtactaggagggtttttcttatgttgttcaagcttaaccaatccatcattatcccatggctttcgtcctctcaatgttctgaaggtaactaagtcgacctatttagcaaagttggggattactggtcagctataccacaagcagttaggccagtatatgaaattagcttgatttcaaagcttcaatcattccaagtcgagtaatatctagtacatacaacgttgcatctattgcaatgcgaaaagcctgggatacgttggaacccttgccctaaccctctctgcctcaggctcctcagatgaaagccaaggcatcaaggcaccaggcaccaggccccgccatcccgccggatctgtgacaacgggagttcacggaaaattggtctgactcactgaaaagaagatcaaatttgtgaaaaagaggtcaatttcatatagccgacgtataaattcctcgcatcgaattgttcctggccgaatttgccttgaaaactcacaccggcaaacttgaccctggccccgctatcggctccagacattctctttcgccttcgaacctaccccaccatccaaagcaattgatcgtgcataagtcggacttcgtgaccttttcaagcgtgcaatcatggtttcaatcgttctaggaagtcaatggggagatgaaggtaaggggaccaagaccagacagagacattcgacatgctaatgaacgaacaggaaaggggaagatcacagacatgctgtcgcagactgcgacactttgttgccgtgcagccggcggacacagtacgttcaactcgctttgcaatccctctaccccggagtgttgaagttttcaaacgagccgtcccaaaaaccaacagtgactgaccaaccggcctttttcaattggatacagatgccggccacaccattgtccacgaggacgttacctacgacttccacatccttccctccggtctcgtctcgccaaaatgtatcaacctgatcggtgccggcaccgtcttccacgtccccagtttcttcaaggaactggctgctatcgaggccaagggcctgaagggcgccgcccagcgcatcttcgtctctgaccgcgcacacgtctgcttcgacctgcactcggtcgtcgacggtctcgaggagaagggtctcggtggccgcaaggtcggtaccactggcaagggtatcggtccctgctacagcgacaaggccgcacgccgcggtgttcgcgtcggcgagatcctagacgaggccaccttcgagcgcaaactgcgcactttggacatgtcataccgcacacggttcggagacctggcatacgatgtcgaggaggagattgcacgattcagggtacgcatgaaaatacggccatttccccgttccaccgacgaatgactatggcgcgacagcagaaatggaaaaatcctgattttctgcatccacgtcacaacagaccgctgacaatctctaggaataccgcacactcctcaagccctacatcgtcgaccagctcgagttcctgcaggcgcacaaggactcgaccaacacactggtcgaaggtgctaacgccctcatgctcgacctcgaccacggcacatacccgtacgtgacctcgtcatcaaccggtctgggcggagccgtgcaagcgcttgccctgaaccccaccagtatcaagtccgtgatcggcgtggtgaaggcctacacgacgcgtgttggctccggacctttccccagcgagcagctcaacgaggacggcgacaagctgcagaaggttggacgcgagttcggcgtgactactggccgtcgtcgtcgctgtggctggttggatcttgttctgtgccgctactctcacgctatcaaccactacaccgcgctgaacttgactaagcttgatatccttgatgactttgatgagatcaaggttggtgtcgcttacatcttgcccgatggaaagcgcactactggtactttccctgcggatcctaatgtcgtcgacaagattcaggtcgagtatgttactctgcctggatggaagtcaaacactatgggtgttcagcgctacgaggatctgcctcctaatgctcgcgcttacattgagttcattgagcgtgagattggtggtgttcctgtcaagtggattggtactggtcctgccagaagccacatgatcacccgtgattaaatgcatctcttatttccttctgtttggttttttttgttctcacgagtgactgtttcttcgtgcatattgcgatacacttgggttgtctgatataagggttccttcttgtcccatattcaacggtttagattctcgaaaatggatctggttagaggcggccaaagtcttttactgtttattaccattgttccggtagaaagatgttctgtcaagatgaaaattgagtcctggatagaataatggcaaagaagtagaagatattgtacatgaaatcaaaagtgatggtcagatcttcgtatccagaaaataatcccgcagaacaaccaagtagagtgagtataagacaaagaggagagaagtctagattagaaacacaaagcacccaagggtgtataatacacaagacagtccgaaaaaaagatattggagaacgccgcccaatgccagaatggatccttcatcttttcacttttggctgactggtctcaccggacagcagccttgctatccatgagattcccagacaaattataattgctagcgttgctggcaagagttgatctctgattcaactcaaacttagaaccggaactcgtcgtcgttgaacgagcggcgaggaggacgcgacgagcggtcaccacggtcacctccacgagagaagccaccacggtcgccgccgcgagggaaaccaccgcggtcaccatcaccacgggagaagttgttgcgctcgccacggtcgccacggtcaccaccgcggtcaccgccgcgagagaaaccaccacgatcaccgccgcgagagaaaccaccacgatcgccaccacgggagaagccaccacggccaccacggtcaccaccgcgggagaatccgccctcgcgtcgctggcgggtgccgtcacccgcgcttacaccgtcctttcggttgagacccatttgctgcatcaatctagggctgagctcagggagggtttgcatgttgtaccccacggtgaacatctggttgagtgcctgaatggcatcttgcttgctgctgaagttcgcagtggtggtgccaagttggcccatgtaggacttgaccttggtagcaccgtcacactgggccagaccctcgttaatcttgttgatgatctggccaactggtgtctcgttagagtgggtctgggagagatctgcatcggcagattccaaagcatcgtccaccttcaatgggagacggcccaggcgcttccggtaagcgtcttgttcgccgcggtgcatgaacagccaaccttcaccctccttgccagcacgggctgtgcggccgagacggtgaatgtaggtctcacggtcgcgaggaacaccaatctggacgacgtgggtgacatccgggaaatccataccacgggcagtcacgtccgacgagaacaagataccctcgcgagccctgcggaagttttctgcgctgcgggttcggaacgcctgcgtgagacgcgagttgatctccagcattctcatgctgcccatggaagactggcggaactctgaagagcgagcaatggcgttaaaaacatcagcggaaaccttggtctcggcagtagagttaaagtaggcaatggccttgaaaggtctcaggtcctcgccgttatcccgacgcgtttgccaattctgagcgagctcaagaagggcgggcaggttgttctcaagaccgcgcgtgtatacaagcttctggggcaccctcacgtgggtgggaacttcatcttcactaacggtgttgacgtgcttaaagcttggcttcagggtctgacgaaccatctgcataacttctctgggaacggtggccgagaacatgagtgtctggcggtccacctttgtggggtcgggaagcagtgtctggatctcttcaacgtcaggagcgaaaccctggtccagaaggcgatctgcctcatcgaggatcagagtgttcagcttgggagcagaaacaccagtccaggggtccgagaggatgtccttgagacgtcccggggtgccgatgagcaggtggcatccctcctgttggatcttggcaagaccggcacgtttctgcgtgccaccaacagcggtctgaacaataagaccagtgccaaacgcaaccttcctggcttcaactgcgatctgttccgcgagttcgcgggtaggggagatgataagagcacggatttctgaaggagcagttctggctgagcggcggccaaccttggagagatcgacaccagggtcattcaaaatattctggagggtgggtagaaggaaagcaagcgtcttgccggttcctgttttggcctgagcaaggctgaaaaattttgcaggttagcggaccaatcagtgtcaaggtaattctgccaatcaaacttacatatcatcgcccttgacaatctcgttgatagtaagagtctgaacctcagtcatagtcttgaggttcatccggtcaggttgaatgatgttcttgataatcttgctgtgaatgaaattctccgccgccaggtcggcaaactctgtgattaacgcaggcttggaggtcttgatctcttcaacaatttcctctgcagtagcctctgcagtagccgcagacatcctcgggaaagaggaatggagtgatctggttgcatcaagagatgcaagagacgaaggagcttgccatttcggcagctggctagtcaaccgcgctgagattgaacgaggtgtagtagcgcgcaacgcgtgtgaaacgccaaatcggcgaactgttccaagcatcatgatagaatgctgatggaaaaaattggatggggggatgatgaagttgcaaattgcactcgggcattacaaggagaggcgcaaaaataattacggggtcacatgatccttatcgaaagataacatccgagataggagaaaataaacaatcgtggcaaacgcggcaaacacggcaaacatggcaaacatgcgaaatctgccaacccaacgacggatctactaagaattcttccatatgttgttataaacatgcaatgatttgggggaaaatgcctgccactagtaattgatggggtttgaatagttcctaggcttacagttctacttgcagtgaatatacagagtcactactcgattcaaaagagtaaagctggtagatgtatagctcaagttgtgaattcttaaatatatttgtatcttcatactgttcatccgagtctcgggaattttcttttggatgaattgtggcaggttcacgctggatctgaagcgttgtagtcgtattcaagagactagcgggagcatctcgaaacggtctttgcgagagagcgagagagtccttctaatttaggtcgccattcccgtagcgcactgatgatcgccagtgttacgagccaattcgattcagaagaaaagagtgcaattcagaccaaattctaagtacgaagaagaaagggagaaagagaaactatctgagtgtatctgagtgcgcgttcttcccttcttatacccttgcgtttgtcttcgcttaatttcgtccgaccacttaggaaggtacaaggacatagtcgttccttcctcgtttggcaagtacgaaaacgtgaccgttcctgcctcgtttggcaagtacgatccttcccagatcgtcacaggaagtagcctaagtatatagtcgaccctttgcaaaccttgcaaactttgagccttctcgcttagcaatctagcaaatatacaaacagcaataagtcagtaaatatgcaaatcgtcggaaaagcggccaggaagacggtggacgtttatagtaggcggtcagtctatgtacgaatatcgtcacagtcagtagttctttatcacgagcttcgtaattcaattctgtggcctgcataatgcattgttttggagaaaaaggccaccgggtgccagaagatgatgaacttgacaatccgttcgtccgagtaatggggatacaccttctcccaaaccccacattttggagggtcatagtgatattggcgttttggtgtctcgtgcatgaagatcagcctcttcttcatgtactccatccaacccctggtaatatatattggttgccactcaatagtgaaaaacatcgaatggaaatcgaggggcactgtccatataaagtctgaagtcgtcgacaacgtagtcgatattggatcccttcatgacgaagtacaacagatctttactgtagaaagaatcacgtacagcccaggctttcgcggtttgaccgccatgttttctttttcgtgattccttttgtcgatttgaccttaaataagccaataccgaaccgtgggagatcacactcgagtttcggtttggtacagaatcccagctcgtcgtgttccaatttcttcgtggaaaacaggctatcaaaagccgattatccgcgatcaggttggtagctttggtaccatcgaacctgccaaattctattgcaagaagttcacgaaaagcgagattctctgaagagcattctcgaaatttggaagctttgttgtaggatcctggaggaagatcaagttagtatgtatgctcgtcgagatacttgacaaaaagccaaattgaacttacattcggaacgataacaagcgactcaatcgagcagatttgttcattgaacattcggaatgtcgcatttgcagcgcactccgggttgagaacgcctctctccttccacttgatagcaagaaacacccattgtttctgatcgttgagggaaaggattggacccgttcttgaatggaagtagttttgttgggcggttgtgaagcaaatgacccgaagcttgatgctactgctgtataactagttagatgtcttggatccttccttatgtcagctaagagcatattcgaaaagtgcaaatggatagtaattacctgcaagactggccacttatatagcaatttgaatgccagagggcaagagatagatcaagcatagatatattatatcatatatgttgtgagagtttacgaggaagaaaattgaaatggttgttctattggaaaataagcagcccaggaatacatagacaatgggagccttgaccaataatatctgtaggtaaaaagcaaaagatgctatatgtaacctgccaggtcttgtaaaggaagagtgcactcagttcagaacaactaagatggagagaaagaagaagtaagttgtaaagtgggaagcagccagttaatatagctgacgacgttgcaaactttgcaaacgtcggacatctcgcttagctgtctagcaaacaatctatctaatgcaaactaataaacaatgcacatagtaagcgagcaagcaaacgagcgagaaagtgatagtgatccatgtggatcatgacagcaagtaaacaagcatataatagacaataatatagatcgtagcattcactgtctacattgaggtggcttcatgttatcagcatataagagaggtaactagttagttaggtagcagtacgtagccttagaaagaatggtcagtcatttctcttgattagaggttagtatagcctgttacttttcctattcaaaggaaaattgaatttacactgaagaaaatgaagcccaacttgaccaaactggacacaatctggtgcccatttcccggagggtaaacactatattttcggagatgatgttggttgttgtgcctgggtaggagtgcatatagcagtggatatttggaacttggaggatcaacatctctgaagatctggctatttttttataggccgtcatatttatacaaattgccgctcatttcagttactatgtacatcgtacagcgctatctgtctcttctcatcttcttccttgatgttatatgtcaggtcatgtgctttgatagtcaaacaaacaaacatgtcaaacacagcaaatcagacaaacacatcaaatctaaggttcagcctaaaccttggaaagcgcaaattatcttcgatagccgacaatgggagggtcagcattaggtagaaattagaaatgcaaaattcgctgaccaatacttttctctctgaatcgagcgctagagagatgccaacgaagtatatacgtatctcaggcttacttgctaaccttgcatacgcgcggagagcagatctcatctgtcacataagaccctcccttctcccgaaacaaaacaggaaactcactcttctccacttcactgactctatatcatggcccctattgatgtagttattgttggaggctcattcgcaggcctccatattgctcattctgtgcttcgtgatgtacctgatgcaaaggttgtgctgatcaacccctcaaccagcttcttctggaatattgctgccccacgcatcgtcgccaaacccaaggccttccgccccgagcagtacttgctgccaattaaggaagcttttgcaagttaccggccggacgcgttcgagtttcttccaggagttgcgacggctatcgacaccaccgccaagtcagtctccgtaaccccgaacgagggcgagcccaagaccctaccatatgattatctcgtgatcgcgtcgggcagcactacatctgccactaccggctcactcaccggcacatccataccattcaagcagtcgaatcgcgatgatatggagcagctgatcgagtcggcacaggaaatcattgcaggggcgaaggagatcgtgattggaggtgcgggtcctatcggtgttgagctggctggtgagcttgccgacgcagtggaacaaagcggcaataccaacaaggtttccatcacgattgtctccgcgacagatcgcgtgctcccaatgctcaagtcatccgccagctcggctgcacggaagcagctagagcacaagaaggtcaaggtcgtgacctcgaagcgagtcattggggtcgagactccggccgacgatagctccaactggactgtctcactggaaggtggagacaagctttcggctgacctctatatccccactaccggtgcgaccccgaacaacagttttattcctactcagttcttggacaaggacggttggatgaaagtgaacaacgagatgcgtgttcagtcgaccgacgggtcaaccctgcccatctttgctgccggtgatatcaccaacttctcgatgcgcctcagtttcaaagctatcgagcaagcgcatgtggcggcggccaacctcaaagcggccattgtaggtggtactgccatcaagaccttcgaccagggcgatagcattatgatggtcgtgcctattggtgaaactggtggtacgggacaaattttcggatttgtacctttcggcttcatggtcaagatgatcaagggcaagcactactttattgaaaaggccgacagcgtactcactggcaaggcttaggttatccccatgattaggcgtattcaatgatgcgaattttcagtttataatgctggtgcatatttccggcaatgactacatactgatgtaattaatgcataattttccaatccaagaatgcgaatgtgaatgtgaatgtttttatagcagaacaagaaagattgatgtatacttcatatagtacttcatatagcactccgtatgtaggtccgaaatacactccgtgcaacgtacaacgtacgtcctccataacccgctttatcccaaaatggccaactggtccgttgcttaacaatcgtgtattcggcttgtgtattaatcaacaattagcccatttggttgagatgccgagggtcacggttttcctacctaaaatggctgtctccgtcggcctgaggtgtcttggattcatccgttccccactgttttaagaaaaaactggttccgttgccacagttatgtgttcatcgtacactcgttggacgtacgttaggggcatgggtaggggaattatgcacatcaaaccataatctgtagaaagtggagtatattccctggagcatcaccatctcgagaagcttctccgtgatccatctggtttataatctgaaaagcaaaacggattggtatttcaaatctgatcggtacagccccgctttgttgaacagctcactcatcatataaagagctccctccatacttcgggggatttctacttcccatatttatctttcctactacacatatacaccatgtctaccaacaaagctctcgtgttcaagaagattcctcagggatatcccgttgctgggcaggacctagtaatcgagagcgccgactatgatgctagcgttgccactcccgacaacggtgtcgtcgtgcagtctctctacaccagcttcgacccctacatgcgtggccgcatgcgcgccgctgaggccaagtcgtacgcccccgcctttgccctcgacaagcccattgatagccgcagcatcggcaagatcgtgcgctccaacaacgccagctacaaggaaggtgatgtggtcattggccacgttcctatccaggagtacgttgccctcagcgagcccgagctcgtccgcatccaaaagctggacaaccccctcggcatcgaggacatccgtgtcttcctcggtgcccttggtatgcccggtctgaccgcatactcgtctctgtacgagatcggcaagcccaagaagggcgagaccatcttcgtctccgctgccagcggagccgtcggccagttggtcggccagctcgctaagcgcgagggtctccgtgtcattggatccgtcggctcggacgagaagctcgagtacatcaccaagactcttggcttcgatggtggcttcaactacaagaccgagaagcccgctgatgcccttgctcgtctcgctcctgagggcatcgacatctactacgagaacgtcggtggagagcacctcgaggctgccctcgatgctatgaacaacttcggccgtatcgtcgtttgcggtctgatctcccagtacaactctgccccgtaccccatcaagaacatccacaatgtcctcgtcaagcgtattactatgcgcggcttcattgtcggtgataagggcatgggtgatgcttacaccaaggagcaccaggagaatgtgcagaagtggatcaaggatggctcgttgaaggtgctcatccatgagaccgtaggcattgacaacgctgccgagggcctgattggcatcttctacggcaagaacttgggcaaggctgtcctgaagttttaagtgttttatgagattgatgaaatagcgagatgcctggtgcatatatttttgttgaaacattagctaggaggtattgaatacctcggttaggactgttcagtagggacaatatagatacctctgaaaatagtcaaatcgaacaaacgttatacaaaaagaacatgaacataccgtaagataaatatcaatttgcaacgaacaacttcataaagactacagatatactccggagccacgaagaagatacccgcagggctaaatggaggtttctcatagagtctcggccaatttcggctgggcggatagccatcgaccaatcaaatggcccgtaaaaggatgacatattgactcggattcccgagacctccaacttcatccgcttgtgttcgaacagcgtttctgcttcttcacatcatactctccactcacaatggcttcatttgcgcgctcaactctgctgcgacagactcttgcccctcgggcacccttcctccagaagaatgtcggcgtttcgcaggtcgtcgctttccatgcctccgctaagaagcagatcctgcccccgttgcctcgtaagtagaggccctgccgtaatgctcattgaggcattgccagtggagagatctattgaatttcgtttatgagcagttactaatttgatttttgcgacacagagaccattgacggaactggtatgtgatttccgcgcctttcctaccgagtcttccctctcttttcgatggcattgagtagaaatgcctgcaatgtgtggagatatgcagtcttcattgctcccagcgctcaattaatgcccatcaaatcgcaacaccgtatttcccgaagtcttcgatattaacctattccaatagtgaatgacgccgctcccattcccacaccccacccttccgagggcagctatcactgggattttgagaggtttgtgctcccttttgcgcactacaatgtcgacctctgcaaccccttccggtaaccccggcaagctcggaggaaaaaaccggctaacatctataccagactggtctgcgtcggcctggtccctctcaccttcgctcccttcgccgctggctccctcaacccggtcatggatgccgtcctgtgcactctgcttgtcgcacactcgcacatcggattccagtaagaacctccccgcgctattccgctattcccctcggtttaccccacatctgcaaccggaaatcgcaatctaacataactctaccagggctgccatcgtcgattacttccctccttcccgtgtgcccaagacccgtgccacctgcaactggctcctgcgcgcgttcactctcactaccgccgttggtctgtacgagttcgagacaaacgacgttggtgtgaccgaggctctgcgtcgcatctggacggcatagagtgctgttacggttccttgtttcagaaatattgtctttttatttcctttttatttcctgcttaccaatttggttctggtccatccaggcgttccgtcccgcctctgtgtatgtcgttgattgtttttcttttgtctctgagcccgaatctaatgatcagtgccggattcctgctgctcagggttgtgagctatagaaaatcaaatggaatataacccctgtacaagacattcttggtgctttttgttttctgtatagtacgtagtgtagatatgcaaccaggttctttgtacactttaaatggtcagtagtattcaatagagtacagtgcttctaccaacgtttggattgctttctaatataagttctaatccttttatccttttaaattctatcagaatgataatgtaaagacacaagtagacaaggctaacagcaaacaagaggatctaaactcatacaaaacacccctcattcatcctcgatctccccatcatccccagaaaaggcatcctcatcatccgccttctccataacagtctcaataatcttgagcgtcgccttgagcggcaacccaataacattatcagcactgccctcaatcttctcaataagaatcgacccaagcccctgcaacccataaccaccagccttatccgcgccctcgcgcgtgcgcacataagctaaaatcaactcatccgtaacatcgccatcaaactgcaccaacgtctcctcaaccatactctcaaccgcataccccgggtctcgcgcactagccaacggcgccatcgccacaagcgccgtgtagaccttatggtttccgacgtcacgcagcgagcgcagcatggccacgtggtgtgcttcggagcggggcttttccaggatggtgcctgtagacgggtcgacgacgacagtgtcagcggccaagatcagggctggctcgcccttggcctcgttgttgatttcttgcgcgtagactgcttcggcttttttcgtcgctgttgctagcacgtactcgagcgggcctaggcttttgggtaggtcttcctctgcgttggaggggatgatttctatgttcgggaggcccaggaaggacattatgtgcttgcggcggggggattgtgaggcgaggattacgcgcctgctgcggaggctgttgaggatggggaggttgagcggtggtgggcgtgggaggaggagtgatgcacggttggcttttgagatgggtttgtcgtaggcgggtggtgggtcggattcgggggcgtcgatgttttccatgtgggataggagggcttctttggagtctgtcattttgggcggttggtcgttggtgtggcgggcgatgcgatgcggggaatcaggtgctttctccgttcgcttgtcgaggcaaatggtctttgtgtgcggttgattgaccttgcaaggatatgcagggatattcaattggggatcccgactgtccacgagatcctgtatgttacaggtttgcgtggagtgtagaggctgcgtttgcttcaccctgcaggggctcggcagatatcaggcggtaagccgaagttcttcactatcgaattttgtgcagagtctatatcggtatatcaccttggtcaccactgcattaattcattatttcgtctaactttccgaggatatactcctttgtataatctggttggctacctaggaagtgcatgactgcaattattctccgtaacctgttcacgtgatgcgaccgaagtacgactcggtcaaataattccgactttaattgaagtaaggatgtcgctgtgggtgctcagccagagctgaaaggaactcgatttcagttaaccgttgggaaagaagaacgccccagttgcttcgcagcaacagccatgaccatccatatacattctggtaccaggagcagaaacaaaccagaaaaaagcttccatgtacaatgatcaagggcagtaggaagaaaagaagtaaaaagttgcggcactgcgttgataatcgttcagtgcattgaatgcggtggaggatgcgtgattggcttcaaatcatatgggaagatcaaatctgccgggcaacgaggaagccctgctgatcatttccaagatctcattcgtaatacagggctggagtagatagacaggaaaatgaaattcgtagcgtgggtataagttcatatggtccaaaatttgagaaaaacagctcggacctcggcacatgcctgcagccccggacccccatcgaccagcggaggggaagaggggccgctggataccgaaccaaagcgcaatgaaatgtcgaggagaataggatcacgttgggcggaaagagtcgtccacgcggccgcctttgctctcgatctctgcgatgagatcgtggcgttcttgcagctttacgtggatgaagtccacggtcttctgcaaaacgatgctctcactccgaccctggccctccagaccaggcaccagctctgtgaggcgatcaaagccttcgcgaatggctgcacgtcgtttttgctccgaggcaatatgattgctccttttttcttgatcggtaagacgaggcttgtccttgtcctgggcagatccctgcttggatgtcccattaggcgttgaggacgaccgatcatggtcatcgtctggattcatcgtgtgtttgatgactggaggtttttgagagcaactgaaagcgtatggtagatgcgccggttgtatacacggtccggggctcttagtatcgattggacgggatgtatagatgtccttatagctctgaggccccgtctagtcaaggcatcgatgagggaggtgattgtaatcggtaaacaacgctcggtggaagaatgtgaaggagtatgagagacacgggaaagcgataggaagcgataaggccatgggccaatgcggagtaaactggagggccgggaacgggccttggcaacttctaaacgtcatagatgggtccactgaacacatcttgctttttctcccgcccatgtcaattttgtcctcacaccaccttaactttccggtccaatttactaccaaagatcatcattccctcatcgggatttctacttagcgagactactgccgccactcatctccaatcttaaaccatctacctagcccacattgcgaaattatcaacgccgcggaaatcctgtaccaccatggccttggaaccgctccgcggctcatgctcttgcggtcgaaatgaataccaaatcaatattccggacgacgtgacaaaccatgccgaagtgtactttgacagcagccgagacaatcgtgggtaaaccaagccaagcttgccgatctcccggctaatatcgcatcctaggtcgatttcacggtacacctctctcggcgtggcttcgagtacctctcagctggtaccaatcccacactcagtccttcttccctgatgaatcgcactcttccattcgccgcatccattcgccccgccatgcgccccggactcagcgtgtcttctgtggctactgcggtacacccctgacattctggacggaggagcccatcgaagaagccaacttcatgtctgtcgcgatcggcagtcttctagtggacgaccagcacgcactggatgatctaagattgcttcctcgcgacttttacgaggaagctccccgtgctggtatctcgacctcatctgatctgacaccaacctcggagaccgcttcatcctcggtcattgttccatcgactactgattcttcggacatctcaactagtctacagcacggtataactggaggaattccttggttcgaagagatggtagaagggagccgcctgggccgtgtgatgcgtactcggcgtggtatgggagtcagtgacgatcaatcaacttcgatccagtgggaatttagcgaatggcatgatgatggaaccggtgcaggtggattcctgcagcaggatccggactcgagcgtactcttcaggggaaatcgcaagcgggtgaatcaggccgatactggaattgagtctccaacgaagcgagcagggtaatatctgcaagtcccaagcccccattgacgcgtcttgagcttttgatgtttaatgtaataaaagataaattgacgctaaagccttttgttttatttttcggacttggtgaaaatcagaggacggagagtaacagaaagacaatcaatactattcgctagagatcttgatagaaccatctagatcaaatgagtacatatgctatatccatcgctcttactccactacaatatagtttaggaattgatgcttgtaccccgccacacctgaaaatcaggtgcgccttcctaattgggtaccgctcctcccttgacaacagtcacaatctatagaatggaatgaaagacagtctctataatatattccgtcatacagtaagagctatataatatatatattatttggtatattaaggcttagatgaaaaatgtagtactaaaaactagaatctatgcatgtaccttttgtatggcctgcctagtaaaatgtacgtccgttgtagcccactcgcttgcgagaggatgtaatttttgtaacaaaaatgtaaggaccgataaaacaccttacaattaggtggtcgctcacgtatgggtggcgagccgtaatttatgtaacaaacgtaaggctgaaattttgtcgcacagcatacccgaaccggtcaagcgcggtccagacacagcctacaggggcctgaccaacgtctcttaatgacttcctaggctcttttttttaccagtgacaatgtacaaccctttgtcaagtacagatcatggtatactgtggtaaaccaagcaaaggatgcggcgagtgcaggtccaggaagattcggtgcgaccaagcccaaccggcctgttcgcaatgcaccagggccaagcgggactgctccggatatcgggaccaacaggccctaatgttccgcgacgagagcaaatcagtaatccgaaaagcggttgcggcctcgacacataggaaacaagcggaacgatcgcgtcgcagtgcaatcccagaaaggaatcctgtacggtctgggcttagtaccgcgccagtggggcaggtcttggacttccactctgatccacagcatatcaatcttgcgcgccagctcgggaatcgcccattggaggtccagccgtcacaggagttcgaaaccaccaaaaatgaagcaatctgctttttcctgcgatcaactgctatccccggcagtttcttgactactgagatgatctctgactctttggtacagagcggaggcactccgagtcagagagctatgaaggcaagcgtagttgctactgccatggctatgctctcccgggtaagagggctaccatcgcttagagatgtagcccaccgggagtatggatccgctttgagattgcttaatgccgctctaaccgaaatggaggaggcgaaatcaaatcaaacattaggcgctgtcatgctgcttgccaaatatgaagtacggaatttttcaccccctcggatggtttttgttgactccctgtttctaggtgatttcgtcaagagccccgaatgaaattgagagttggaccaaccatatcagtggagcaatggccctgctagatctacgcggcgctgataaacttaagactgacaccgatctccgcttgttcttataccttcggtatcagattgtgagtgctatcgatcactccttcgatcactccttcgatctcaagctaacccctcaacagaccatcagttgcctacaaagagacgtgcgcgtgcctgagtcactaatagaacaaacgaaaatcgcgatgattcttcagccagaacaagttcacggcaatcggctactcacgataattggaatactatcgaaccttcgcgcagacatctgcgccaatatgtacaacgagcaggagatcatatcagcagcgtcggctatcgaagccagtttaattgcctggctggcagctcttccccccgaattcaactataccacccatgtaatcccccccctcgacttttccatccaaaagcgactccgaggcataactccatacgacgatcaataccacgtgtactcctccgcctgggtctgccattcgtggaaccaataccgcagcgcccgaatcatcgtcagcgaaattattctctcccgtgtccggcgattatccgacagttcctctatgactttgttgtccgaagagttgcgtatccaatgcaggacacttcgatcgacgatccggcggttagccgtggatatctgtcgcagtgttccttttcacttcatcggtcaccaggtagatagggtgtctagtctcccgccgcctgaacactacgttgcgggccttgtgctcctctggcatctatttgtggctggggttgttgagaacccccaacacaggctgcgccgttgggtagtcaagtgtcttcaaatgattggaaacacgatgggtatcgaccaggcgctggcagtggcagatattgtggctgatgatcctggggttttacattccgtgaccgaggaagaagactctcactcttcagatcaggatctgacgaggcgagatctagttacgcctagtggaaatacttgcctcggggtatatagcgactgatatagttgtctttcttttttcattcttgtttattatgccgacaatttgtccgtttcttttgtgttacagcctagggtttgggattagcgcctcatgtttcggttctcattatgactcacgagttgtctctaacaaacaatcaaaggaaatcttagatcctctgttatagtccatcatagcgtccaacaagatcccagaaaaagtagagcaagtggtcttccgttcacgttcatcctatgctgcgcctcctgcattagaattgccgtatgcggggctgtgtttgctccgccatcagtcccaaagcacgcttccggactgtctgtgcactttaaacctcttcatacactctatatgattggttaaaaagtgacgctggagcccgataattttaccttaccctgcggttgcccggccctacgaatgagcgtctctcaacatccctgttaattacaaatagggctgcagtgagtcaaatctgcctcgcaattaatgatggcgatggccttttcgatctttgatacacttagggcggccactagattgaatctcatgtgttaatgtccgtgtgttgatcatgcgtcgggcgtaaatccgtggttggttagaagtgtgccttggtctatgcctctaccctatactactctttgtatattgggtttcacagctaagcccctgatggcagacagtagatataaagaagttgtttcccgggtcagatccttctagggcataccatttcaggatatctgagcagtctctaagacaagtctatttgacatatattcctcacctacacttcattttcaacatacaatcttcagccatgggtgtatggaacccgttctcaaggtatcggaaagagcgcaaggcagggacaaccattacagggaccacagtgaccacaccgacgcatcgtccatcatggtcccgaggccgtagccctaatacatcaaatgcccaatcgtcagaccgtccaccaccgtatcaagaagaaattccaacaatcagaatcagcgccccctccgaaccagaatctgattcccagtacgccttcctcggccaattccataccatttttctggtagacgatagttcaagcatgagaggtgagctttggaacgaagccaaagaagccatcgccgcgatcgcgccaatctgcacgaaatatgacagcgagggaatcgacatctacttcatcaaccaccgcccaaagcccaaccccaacaggtccaactacggctacggttatccctacaactccggctcgggctacaggcgcagccccagcggccatattcccggggccaatttcgactacaactacagcccgggccccagacgtccaacactcgatgccagcggataccacaacatcaaaaccgcgcaactagtaagcgagatcttcgcctctgtcataccctctggtggaaccggagtcggggctcgactatttgatatcctggacccatacacgaagctgctggaagcaaaggagacagagagacaagcgcagaagcacgtatcgggagttttggccaggtcaatcgagctggagccggtcgagtcggttaagccgatcaatatcatcacgatcaccgacggggtgtttacggatgatgccgagagtatcattatcaagactgctcagactctggatggccctgcttgtcgtgctattccgtggcaggttgggattcaattcttccagattgggaatgacgagatggctcggcagtatttggatgttttggataaggaccttggcagccggtgtcatgatttgcatctcagagatattgtcgatactgtttcttggcgaaatcgggctggggagcggttggaagggtatgggattttgaaggctgtgcttggggctgttcataagaagttggatcgagatttggagtgttaggtggttggtttctgatttatatatttcccatccaatcgcatattttgactgcaagtgcaaaagtgacatatcatctgcacgaggacgcgctgggggtggagaattctcggatataagtttgttagctgaatttaatttattctccatgaccaatgagagatactgcaggctttacttcggtatattagagctgagcttgcagctttgcgattttgtacaattcatgcactcggtagcaactgatctgttgatctagtcaatctggtcagcctaattgatccaaccgatataattgctctattgctttatttaatctaattgtgcaaagtggtaccttgcataaagatcgacgaactacaatgacggggctggatcggaaagatcgcaagccacaccatctgagaatccgagagtccgagaatctgagatcacatttctttctttcttcttcttcttataacaatcttataatttctcagatcagcacgcatcattgaacacttccagatccactccccatcacggccgaattttatgatcgtcaagtctctccgcgcgccgatctcctaaaaacctcgaattcgtctcctaacccccttctctctatttctctcattttcagccttcaaggctttgttctatcatttctacattccaatcatttcaaccgttttaacctcattttcctcccttgtttcaacatccctgcagcgccaagagccctcttagcgccggactccttacgcaggaacatcaccaacccgagtggtcggcgcgtcctccttctgctcccccattggtcaaccttgtcgccctgcacagcgtcggggaaattgcaccctcgcggttcctgaagcaatcagcctatttgattgtttggtttgagccctgtgtgtccaggccatggcatgttgttctgcggcgttgccccgaacatacctgaaacaaatcgtttattcttagacctgtcacttgaacttgaaacaggcacagcgtgcttccaccggctgtaattatagaaccgcctttgtcgagttggctttgtgtctgtgagctccggggcttgttttgtttataagctcggactttcagctgaggtccaagggtctatagaccgttcttcttgttgctttgcatttgtattctgggattctgtctttagcattttggtttctgattttgcattgttgtgcattttctttctctgatttgttctgttcatttgtgctattacctgccttgctcagcgatctctcttttgctctttttcttattgtcttaccttgcgatgatctcgactaccctcatgacttttttactgtgagtgcgcccagtgcaattgatatctccatgcgctgaccgcaattcagtattaccagaccagaggtccggtcggtcaagctgctcggatcatgggataatttctctaaacaatatgcgatggaaagagatgtgcgcgtcggtcccggaaactggagaggatgccatacctttacggatatgataggtgatgggccagacaagacccaatggcgaacagggggtctgaagatgggtggtacttactggtattatgtgaggctcaattcaagcatatgagatgaaagagctaacgaggaaaacagtatctactcgataatgacatagagtattacaacgaggcagagcctacgaccacaatgtgcccgcttcttccggggcaaccaatgaatgtgctaaatgtccctatcattttacctgacagccgctcacatggacgctcggtgagtgccagctcgcaaaaatccgaacatcttcggaccatgaatcccgaagacaagttcatgaatccgcggaagccgccgccccagcctcagtctgtacggcttcagacatctgcaccagtatgccgcgaaccgagccccgcacggtctgcgagtagatctccgatggctggaatccaccggagtgcatctcagccgcacggtgctcctcggaagggccataagaaagattcacgttctatgtctcctccgagagcacgagccattctagctgctttaaggcaacccgctgaggtggatagaaggttcgagtcagtgcaacatgcgaatgcttctaagctagcacagcggcagaaagaggctgttgaggatcgccgcaatgtccctggaatcaaggttaacaccggagttgcgattccatcttcgagccctcctgacaaatttggtctgtccaccatccaaagtcgtcgcgcgatgaaggcacccgctggggaaacggcaccgagccgtcttctcacagtgcagacgcgtccggatcccccccaaaccagtcattctcgcagcgtaacaaacggaaacaccgtcgaatccgacgaaactcgtgcgatcagggaagccctgaaggatatcacttgctctggtgactttcctactccaactgccgtgtataccaaagataagaggctccctacacttccaaatacgccatcttcggtcatggatgaagcagttcgcgctatcgacgagagagatagggagatggatgacgagatcccgcgcagttacttctccagcatgacagcaacgacaatcgactccgcccattctagctttgtacctgaatacagtcggttctccggatggagtaccgacactgaaaccgactacaacccacgcgaatcgatggtatcggcctcatctaaccatcaccaggacgagtcttcggcggaaagatggacaacaccagacctctcgcagtctggcgatggcgcaaccaataccgaccctaataccccccacctcactgtctactccaaaccctcatctccgaattcaccctggagcgtcggtctccctcaactcaccgtgtccctgtccacacctggcctcgacttttccgggttgggaatcgagaacatggatgaagtggagagcaaccccaagcgccacgctgctctatttagcgcccttgaatcaatggaggccttcgcgatgtcgcgcagccccgacagctccccgatcctgctctcccaagcttccagagactctgacatggagcaatatcgctctttcacagagccgaaagcagagtcgaaaatgagcgaaacttccctcgagcggattcggtcccgtcgtagcaatgcttcgttccagggtaatgctactatgcaggagttgatggatgagctcagttatctgaagaatctgatccaggctgacatggatggggtgccgttttgatgagactacctcagggattttctcatgttcttatatcatattactggcgctggtcgtcggtatggagtttatgtaattcgtacatatatcatttagctctcaatagaggagacattatatcaaaagaaatacatcagaaagaaaaacaagtctccaatgtgtaaatttaaccgacctagtagagagtagagtcaaattgatgtaaactccgtagtgacgttggtgaatccatatcaacagatcggacgaaacaccaaacacacgcgccaagaatccctctgtatccaccacccgcgatcaacagcttcagccaaaaagaaacagcgccacctcaattcttgaacctttgatgttctcaagaataataatgggctgaatgggcaatttatcttgaagaaatacccagaatgacagtcgatggcccccaactgacccccgtcggggagaagtccctaccagcaaaatgcaagccgcaggccatggcgtactgtcccacgatggacctgatagcgctggcgaccgaggacgaggaactgcgcgtattccgactcaatggccagcgagtgttcgggggttcttttggtggagatccgtacctaggcgaggatgaagaggacggcgagattagagggatggcgtggaaagggaatggtaagtttgaatttccttgtcgctgagctttgctatatctcttttcctataatcggatcttacccgtcttgctgtttatttcacgcgcgctcatttactaatgctacaccaggtcgccttctcgctgtcgcgtgtggagatggctcgctccgcatcatcagttcgtacaccgggaagacggtgcacaactatcagacctatcagcagaaagaggaacaacccaatcccactgagaacccgtcacccaaggcgacctgcgttgggtggggtgtcaatttcaccgatagcaaagccgcacagcggcacttgcatgaatccgcgggccaggtctccatcgacgaccttttagccccgggagtgtatccctccaaggcagccatcatgctcaaagcagacttgccaagagagcttgccttgctggacattgagagctcgctgccgaagctgagcactctgcctgcaacaggaggcgaggatgacgttttcagctcgcgcgcgtccctagacgccatcttccattcatcgaaagataccaatgactcggtcgatgtgctctccgtcgggtttagcgatggtactgttcacctgcgtatttttgattgctttgagattggctctttccctgtgggaagctctcccggtatccccgactcgtgccgtatcttgcggcatgcttcgcacccgttgagctctacacatgctctactgacatcgccggtcaagggagacactcgtggtccgcttgagcttgtcacgatggaccttcgctttattacgaagtctgggagatatctgtctcttcttgcgtcgaaaactactcagcttcagaatttgctccgctatattggtcaggtgcagcggcagattgagcttgagtggaagaatgcccaggagcttcctgcgcgcttcttgcgtagtgtcaatgaggacttgaaggaaaaatgccagtgtgattttatcactgctatctatcacctggtggtcactggtcattgcttcgagcccatgaaagaattcctcacggatattgttggagaaagagtaagtgagccttgccatttgggagatggtgtgctaatggacggcatagggccacaagagatgggataaagctgtcttgggcggctacgagaatatccggcgactgacacacgaatgtctcctcccagccttggagcgcagtcaagtacttctcagtcgattggttggattgtctaaattccacaagctaagtgatgtccttgggctggacacgaccaagcttaatgccatcgtggagacacttgattgtctccatcttcttgcacactctgttctcacgcatgccaacgaggaaatgggacaatttaccgctttctctagatggcttcggtacgagattcaggttcttaatagcgagcccttgtcgcagacacgggaagaactgctggagaaaagagacttgttcgatgtccctccaactgtgaagtatatcaaaggcgcattgaccaagagtgctctacggaacttcatccgccaacttcctatgatcggagttgttcagcctcctgcacctcccgctgataagtggcttccagatggccacgaccgctcgttcttcgatactttcaagtcacttcttcaacagcaacgcgagtcccgggacaggggtggcgatggtacatcgatagagacgcctaagctcaatgacttgacgaagcgtctggggatccagtttgagaaggtctttgaagagattgccttgactcagcgcagaggaattctctatcgctcgcctttgacgcttcactctgattgcgaccaagaggttaccgatctgactttctgttacgaggtagtttaagactggtgacttttgtatcgttctaagctaactttcgctacaggatgctatagaaggccagccttgctcagtatatgtcgctacccgatcagtcacatcaaaacatcaaggttcgtcatacaatcaatcatcaaatccagtttcttatactcacgcaaatagtctatatctaccgcatcgtccttgactcagtcggtggcgtcagctcaacaagaagtacctccctcgcaaccctcgacctccaaaacggcgaagtccgccaactccaattcgtcaacgacgacacactcatgattctctggcgcgatagcagtaagtcactcacacatcgacttcatattcctcctctaaattctgtatgcaatctaacaatctatcgaacagaaggatcctcccatctcctcaacttccccttccaacccgactcagcacaaccccaaagcgaagcaagccacccattacctgtagtccttggctacattgaatgtgacagcacgccatccgttccaaaacctactaccccgcccacgacactagatctctcgcctgaattccaccacacgagtgttcttatacatatcttcgctctacatggccctaaggcacggcctatccatgttgatgtcaatggacggaagggacggcgcgctatttgtgttttgtatggggatgctatgcggtacgaggttttggacctagatgctgcgatgggagaggacgaggacgaggaagacgatgaggattaccaagaggggggtgaggaggaagatgacgacgacgaggaagtcttcgatagtgatgaagaaaataatgagaactaggattacattgttatatgggaatctgcgtcattcacgggatatggtagatcaacattgcatcacttcccggtctagacctgcataacttcggataagaacttcaagtaatcctgaaccagttgggggaaaggggagctttatgttatagttgctggcagtgagacttatctgcgcttttctagcgtcccttcttccaagatatatatgcacctatactgtgatagttagttcgttgatagtattgctgctgccctcatttataccgaacgttgtatagtcagatttctgtcagtgagttatgcatattcattgatcctaccataccttgctttacaccctgaattctgtcatatttcaacaccttataagttcagataactataagtccagatggtcacaaattcaggatttgaatttattagattgtctcttaagcagcaaagcctcataaacaaagaaaatcggctatctaaaacttctaataagaagtatcagggttgttgatccattcagaccagttgaccctttggggtggcttagctaggtcgaaccagtagggctttgcctcattccagggtgttggcttaacctcaaaccactgacggaagccgaccataaaactataggctataaattagtaaatccctttagagcaagcacagtgcaactgataaggaggatcgtacattaccggaggcggaataccaaactaaatgtgagaacaaagggcaaatgccaataatttcggtctcactaaaaggggccgatgttagtatatatctataataggcaacgtggaatagaggcgttaacttcttcccgaatattgtggcgttgatcaacactcatatcccagaagacctttgcgccaagactatcccctagctaaataccaggcacttgctcccacgcaacgagaccaggaagccagcgggtacaagagcagagctctcttgctcctcttccctatatcctaggaggcggggggtgacttccgactgcttatcggtaagagtcttatatgctactagctcgggcggagtccacgccctagcttgcctagcgcgggtagtataatcgtcaaactctgtgcccaggtggggcagttgcttatatatcctaacgaacgcgattttgctagcatctccgtgtttgttgcactggtacttgacggaggcataggagatagcggagtggtcgggattttttcggtgctcgtgttcgttaacgcgcttgaggacaatccagcatcgaagacaatactacggagctcggggccccggaaccaggaatgctgcgaagtcatttcaattgataagactgaaggagcagggtacggaaacataatgatggcatggcgaagagggagcaagttgatagctaagtgatgtaagagaatggtgaactttatttttggcatcgtgagtgagaataatctaagagagtgttcagttggttaacttaagatagcaatacttcaatatgctggcaatcttttttttaagttatttctctctctcagtactataaaagaataatgagtagcagaacggaataggtacgatataaaatggcggtaaatgtcataaaccgtactccgtacagaggactttctctatgtagacctaggaataagctataatcctttgcttatttcgttaagtctccagttaagatccaagaggcacaaatttcatggtcaccaagctacaaaaatgcaacgaacacaaggtgaacagcaaatattgatcttctcagatgcatcactttttggtaaaaagtccttggctgcaagggagggacccggcctgaggcagaagatcacgtgtatatgactaacccctccacagggccaatcagagattgccccccgtagaacctcacccattgtggtctttcgtgcttcgaatctttgttttagtctcttcacatatcttgcacttctacagctattcccatctcctccagacctttccacccaattattgtgtgttgaaatctgggcgtgcactcaaggcaccttttcctctctgcttctcgtcgcggaaagacctagtgcatgccgcctcgtcatatccacaaaaacacccgtcccttcttcccactcttccacaggaaatcctctttccaccactgcttctatcgtggtgatcagcgagtgttgaacccttgattgatccgggtccagaggggttttaaagtcttttttctaatctcttctccacctcttttttccgtcttttttctccccccccccccccacatccctcatttctttgcacatcatggacgcccgtcaggtgttgcagagtaccctcgcgccagatgcggccgagcgtagcaatgccgaacagcaactcgcccacgctgcggaggttgacttcgtatgtgtctcctcttaccccccttcgtcctgtcacgagccatgaaagatttccccaggattccgaatactgatacttttgtcgcctgataggctgcctacctcatcaccctcggtcaagaactcgccaacgaaagcagccccgctcacatccgtgtggctgctggtatcgctttgaagaacgctttcactttccgggaccaagccaagttgcgcgaggtgcagcttcgatgggcccagagcatcaacgccgagaccaagtcacaggttaaagagcttgcgctcaagaccctgcagtcacccgatgctcgcgccggaaatgctgccgctacactgattgtttccatcgccgccatcgagttgccgcgtggtgagtggcccgaattgatgggcattcttgtccaaaatgtcgctactggagacgacgcactgaagcagtcatctctcactgccatcggttacatttgcgagtcgcaagatcctgatctccgcgccagcctgacacaacactccaatgctatccttaccgcggtcgtccagggtgctcggcgcgaggagcagaacatggatgttcgttatgctgctatcgccgctcttagtgatgctgtcgatttcgtgcgaaccaacatggataacgagggagagcgtaactatattatgcaggtcgtctgcgaggccacccaggccgatgaggtccgtgtgcaggctgctgcattcggctgcttgaaccgcatcatgggatcctactacgagaagatgcgcttctacatggagaaggctctgtttggcctgagcatcatgggcatgaagagcgaggaagaggaagtcgccaagctggctattgagttctggtgcacagtctgcgaggaggagatcgctatcgaggatgacaacgctgaggtaattaagcgcataaggctgagtgaccttgaccatgtactgatatcatgttactttaggctcagcaagagggcgttgaggctcgtcctttcttcggatttgctcgcgttgctacccgcgaagttgttcccgttctgctgcaatctatgtgccgacaggacgaggacgctggtgatgatgagtacaatgtctcccgtgctgcctaccaggctatgcagctttacgcccagtgtgtgcagggtgatgttattcagcccgtcgtgacgttcgtcgaggagaacatccgtaatgaggactggcaccgccgtgatgctgctgtcgctgcttttggcgctatcatggaaggccccgaacccagtgttctagagcctctgatcaaacaggccttgtctgttttgcttggcatgatggaggatagctctatctccgtccgggactccaccgcctacgccctgggccgcgtgtgcgactgctgccccgaggtcctcgatcccgaggtccacctccagccgcttatctcttgtcttttcaacggcctcgccaactcccccaagatcgctagctcctgctgctgggctcttatgaacgtcgcagaccgattcgctggtgacgatggctcacagaccaaccctctctcaaagcactttgaagacagtgtgaagtccctactgaccgtgaccgagcggtatgttccctaagcgataaccctttgattcctttcatctaacgcccgtacagacaagacgccgataaccagctccgtaccgctggatatgaagttctcaactcctttgttatgaactctgctaacgatagcctgcctatggttgctaaactctcagatgttatcatccagcgtcttgagcacactgttcccatgcagcagcaggtcgttagcgctgaggaccgtattctcctcgaggagatgcagaccagcttgatcagtgtcattctggccatcgttcagcgcttcgaggccgagatcaagcctcaggctgaccgtattatgagcgtgctgcttcaagtactgactacccttggcgcaaagtcgagcgtgccggatgtcatcttcgccaccgttggtgctattgcaagtgctcttgaggatgatttcatcaagtacatggattcatttagcccattcctgtacaacgccttgggcaaccaggaagagcccggcctctgcgctatggccatcggcttggtcagtgacattgctcgtgctttgaatgagaaggtccagccttactgcgacaccttcatgaacctcctgctcaagactcttcaggtaagattgttccttcatatatatcgagcttcatatatatcgaggttgacgtctaatgctaattttacaaacagacttccaccaaccagctcaagcctgcgattcttgagaccttcggcgatatcgcccaggccatcggaaccaactttgatacgtacttggcggtcgttggccaggttctccagcaagcctccagcgtgaccaccagctccgacctcccatacgacatggtggattatattgtttctctccgtgagggcatcatggatgcttggggtggtattcttctgtcctacaagggcactccttccagtacgttactcttcactctccacacatacgatctcaacatgctaattagcttgcagtcacccaactccagcctttcatcgagtctatcttccagcttcttcacattatctcccaggagagcaaccgcagcgaaggtctgatgcgatctgccatgggtgttattgggtatgtcttgccggcttctattctcgattaaatatactaactattcaatagtgatcttgctgatgctttccccaacggagagctcgctgtttacttccgcaacgactgggtcacttccctcgtgagagagactcgcacaaccagacagtacagcgagcgcacaattgagactgcccgctggactcgtgagcaagtcaagcgtcagatcaacatgggcgctggtatgtcgtaaagccgtgattatgtcttacctggttgattgccactgattctggtccggtcccgtctgccaaagcatctgccacccacttcgggcctgttggtgtcaatgccacaggtcctagggtcgcttgagcccacacccaatcggtgctcctgatgtgtacaggatagctgttctattctcgacgttgtcgtactgaacgcttgggcggtagcctcaaatccctctcccctttatttcccagcacaggattcccctcccataactccctttggtcgcgaactccgttcccccatacctttgctgctgctcaattcccttatgacacacattcgaatgagtaacctttcccaatccctgtacggccctgtctgattttcctttttcttcttgatacaaccctttcaccttttcatctttcccaatccccttctatgttgtttttaattagacaagaccccgcccctcgcatattatagcattgcgaatcatgtagcccaagaattcatgtatcccctccccctctactgtgctccccattcatgtatcctttcccctcatgtcaccccctccagaaaagagtcattgtcatgaaaaagctgtccctgatttcgtctcccttcctcgtatacaccgatatttgcccacaaccatgctatcaagctggaaacccatgtatagaaccgcccatctgaatctttcccgcggacggaataagtgaattatgctgctgatgagttagtagtagtaggagtaaagatgtttgtatcactatctgttttgatcttctaatggtgatttttttctttttttcgagctctcattttgcttctatactttgtattatgtaggtacaatctggagttccagatatattattcattgtagttatctggtacagttcactagttaacagaatagtgatgccttctaaccttcgaaggttcaggcaccgacatgtagcagcttatcaccacgtgaccattttctgataagggctacctcacacacaaaccctacccgcgcaccacccgaaaaccaaactttcaccgatcgtcagattcttccgcttcaaccatcgacgaccatctctcgaggtatgtgctatatcctcccccaacaacagccttccagctagtctggggatgcaatcatcttgtctagattgcttccttttgaattatagacaattctcaggaatcgcgatccaggaagccaagatgatacgcatctcccaactcggcacgggctgaagaactccttgcaatgcaaaaaaggggcactctttgcgctcgaagactagtggtggctgacttaaatcgccttcgtcgaacagatacctcataatccttacttttaaacgttacgatttgagaatctcgattctactaaaccgtcaaaatggtcaagacctccgtcctcaacgatgcgcttaacgccatgaacaacgccgagaaggctggcaagcgccaggtcctcatccgtccttcctccaaggttatcgtcaagttccttgctgtcatgcagaagcacggtacgtgaattttgaaattttctcgtcttttcatttcttgttgcgtttttgtttcctatgacctgtcttgagaatatttgtccccccccccccccccccccccccccccccccctccccgccccccgcccannnnnnnnnnnnnnnnnnnnnnnnnnnnnnnnnnnnnnnnnnnnnnnnnnnnnnnnnnnnnnnnnnnnnnnnnnnnnnnnnnnnnnnnnnnnnnnnnnnnnnnnnnnnnnnnnnnnnnnnnnnnnnnnnnnnnnnnnnnnnnnnnnnnnnnnnnnttgttagaatttttgcccccccccccccccccaattcgggctgataactaggcggccggtctcaatcaacctacgacgtctgccttttaagtgtccgatatattaatttgcgaagatcttacacgtttccaaagcgctgttatggctttttctgtatttgacgacttttaaatcttcacaacatactgattctttctttctcaggttacattggcgagttcgaggaggtcgatgaccaccgctctggcaagattgtcatccagctcaacggccggtacgtttcacgattacatccaccagtctccatggaacatcaagctaatgttatatctccagtctcaacaagtgtggtgttatcaacccccgctaccccgttcagctccgtgacctcgagaagtgggctacccagcttcttccttcccgtcaattcggttacgttgtcctgaccacctccgccggtatcatggaccacgaggaggctcgccgcaagcacgttgctggcaagctccttggcttcttctactagatggagtcgttctaaaaaagaattgagaaaaagttcttgctttgactggtttcgcatggcgttggttttattgggctggaccctggaatgtaatctggaatttgtagctgtgaacaaaataccccatgttccgcactttcgatggtttgcatagtacacggttcgctcgtatcaatgctagatgattctggtctgcaattttgtacttctttttcctgattttatcgtagcctggctcggaccgaggtgtactttcaccgccctcgtgtaagtgtattctgcctttcccccgcaacaacaatatcagtactgtacatagttgaacaacccaagaattctttcgccatgcctttggacacgatatatctgacccgtcatggagtatgtctgcatacaatcatcactgcgggcttatagacctaactatggcagcaccgcctcagctggaccattgacttccgtacaggcacatacagggcccaattccccacgccgacaggaaacccagcagaccctgcattgacctcacacggcgtgcgccagtcacacgagctggcggaacatatttctgcaccccaattccacccgaaaccattccgtatctactcgagtcccttctaccgctgccttcaaacaatccagccttctgttgaagagctgaagagaatatcagccgagtctggaaggagccagcaagatggcgagattgggtcaattgatcggcatgcggagcttgacgtacgaattgagaatgggttagggtaagtaatatacctataccttctttatacttatacttccatccaatcactcaactatttccctctcgtccgaacaaaagaagcactttaccagcacattgctatccaggaagctaataagaattcagagaatggttcggcgcaacagatttcttcgaccacccgtcccacccaacctccgagataatgtccacccacttcccaaccctcattccagaagctagtcaaacctacataccactactcatcccttcaagacgtggcgagacaatcaaacagctccacaaccgcctagcaacagccctagaaggtataatcgccgacatcgacgcagaagtctccgctgtggaagcagagctgccaccaaaccaaagaaccagcaaggccgtcctgatctgcgcgcatgccgcgccgctcattgccatgggccgggttcttacgggtcgcatgccggatgatagctctgaagaggactttaatgtcttcacagctggtttaagtacctttaaaaggaggggggcttcttctactgctagtgctggacacggcggtgataaggaagaaagttcgagtgagaagccgcttgccgagggcacgacgttcattcgtgcgtcggtatccccgccgcagtggagaaatgggcgtggtgttggtggaggatgggattgtgttgctaatggggattgtagctttttgagtaatggtgctgaacgtggatggtgagtcgatttcttccttcccttcctttggtattgagagacaatattaatagaccccggcaggcactttgatggcgaagaatcttttaatacgggtcctatggctctgccttccgatctacctgtgaatgtaggtgccacgaaactgtgagtgaaggatttgcgcaactatactgtgcccgtgggtttggcgaacataacgatgaggtcattgcatcttggatcatcaagtactataatatatatatgactccgaacaatgactacaaaccggcaatttgagctgtcatgatctatcactagtgtaagagaaatacatatcaaacttagagatgaaactaagacttcttgctaaccgcttacgactatttacgatgtacgatgtaagagcatctagctcaaaacgacatggacaactgacttgaaaaagaccaattctgactaccttacgtacttgatttcgtggctggcattcttgtgggtatcactttggccctcgtcgagttcaatcgcaaaaactacattgaagacgctatcgctaataaacgagaatataaaaagtacctccaggtatagatcagttcccttgttcagactgtgcatgcgtattcgagaccccctcatgttcagtacctgcactctccgcaccctctggcacaccaggttgagcccgttcctgttcctggccctcctgctcacgtacctgctcctgctcctgctcctgctcctgacgttcccgcgcctgacgctcctgttcagccaagaaagcttggtccgccgcagtgcgagcctggacatgccgctcaccaagaccgggaactagactcgcaaaaagaaaaacaagagctcgctccgcgcggcatatttggtcccaaatgctgaactccgcagcagcgttattggctccattctgggtggctcgatctgccgggccacctgcatgggtgaggccctcgagatgtcgttggatgggaccaataatcgtagtcgcaaactgccgcgggatactggtctcggaaaagaatgttaccaacagggcaatgctgacgaaaatgtaacgcctccaggtgccgggcgcgctggtgaggtagcagaagagccacagacgggtgaacagccagatgcggcggatatgtcgcgccagaccggcgtgctcgacgttgttgcctcggcgctgctggttgagcattgcttggcggatggcattctggaccactgctgcgttttgattgggtgcttgaggtgcctggggtgcgttgggtacttgaggcgcgccggtttggttagcaggggctgtattgggcgagcccgcctgctgcgttctggggcgggctacacagtttggtctcacgagaaggttttctcccgttggcgaggtcagcatgaagagctgagtggagtttggcgcgagggtgttcaagacatttgtttgggtagcaataggggcctgggctagaatgcttgcctgcgaatgctgttgctgcatatattccattatacgggcgcgttgttgaacatcaagaatacgggcaagtagttctgcaacaccgggcagaggaagctgtgtcgcaggccgtgcatcttggattccaagaatctggttccgtatatgaatgatactctccatggatggcatgagacgtcggtccaattgtccctcaatctcctcgatgtaacgtcgtaaagtgagaatacgctgagatgattctgtactatcagcttctggtgcgtttgtagttgctgagtgtcggttaggcaaagaggtattgacgtattgattgattatcatgtgcggagaagctgaagcggcaccgattgttctaggaatgctagagtatgaggacacactggctgcaggcaccgaagtatcgggattggagtgatccaaccatgtggaggaggaaccggaatcttgggcagaatttccgaaaggcgaatcttgcggcatctcagagacaataggtacttctgtgtgtgctggttcaggtggtaggacgaggtgcatactatcagtgccttcctgcaaaataaataccgttcagttaggataggccatatggcgcgggttagaaacgagttacttacctcgatagatgagaccactaccccgagtgttgcgtcatcgacagttagaggcttccctcggtagatgagcctctggtgtgatacttgagggttgttcggaaaagactgttcgatccggctcttgagctgtccgactgtggaggagagtggaacgttctcgagtgtgaaccggcttggagggggtagagactggcagagtatgtgaagcgtgattgttctgggtgtttctccctctactataggctgggatggtagtcctgtcgccattgcttcagatctgtggttgttcgcaagctaaaaaaagccaatataaagcggatctagttgctgatatctggcatcaattgatagtccacgggtgttttctgcgagactctatagcagataggaaggacgtgggaagaacgatgcaagatgataaagatgcaaagatcaagttgcaggaacgctcatttatactgaaatgtatttggatatacagagcagagagaaagacagtctgttgcatttccacgtgcgattctgccgggcggtcaaccggtaacaacatgttttccccatttcggaaaaaagcacgctctgggcttaggggtcgattttagcgctccaggccgatggattaaaagttatggccaagcgcctctttacttcttcacctctccttcattgcccttccgctggccctcggatcggggctgcgtcgatggaggttctttcatttcgggctacggcccgccataaagccagcctccgacatttttcgtctaaatcatggagacaataccagaaggataataactccgaaaacaatagaggaggatttggttcaaggctagggtttgctctgcgcaataccaaggtcgaatggtatcccatcccagtcggactcggaatcggtttactagggttgctgtcgttctacaagtcacaacgtgcggagcgggatcggttggctcgtgatgcagccggcgatgaatgggaagaaggaaaacggccacctcgtcgtccgaggatcagtctgtcaggaccatggcatattcagatcatgtccactctgcccctgaaggctatgtcgcgtctatggggtcggttcaacgaaatcgaacttccttactacctccgcgttcctggattcaagctttactcctgggcctttggcgtcaaccttgatgaggtcgccgaacccgacctgcacacctacccgaatctggcggcattcttctaccgtaagctgaagcctggcgttcgaccattggaccccgaccctcgtgcactcctggcgccctccgacggccgaatcttacaatttggaatgatcgaacggggcgaggttgaacaagtcaagggaatgacatacagcctggatgcccttctaggagcagccacgcctgcgaacgccgaccacagcaaccgactcacggaccaggacctgaacgaagaccaaaaggatgttgagaacatggatgcgcatgaggagtttgcgcgcatgaatgggatttcctacactctcccgagtttcctttcgggagactctgatgctcccaaaggacgtgcttcattggatgcttcaaccgcatccaaagcaacctcggaaatgcttgtgcaagaggacctggccctcggcgatggaataccatggtacgcgcccaaagcagcagccaaccatgccttgttctacgttgtgatctacctagcacccggtgactaccaccgtttccactcccccgctccctgggtggtcgagagccgccgccactttgctggcgagttgtactcggtttcgccctatctgcagaagcacctacccggtctattcactctcaacgagcgagttgcactcctcggccgatggcgctggggattcttcagttacactccggtcggagctactaatgtaggctccataaaaatcaactttgactcggagctgcgcacaaacagcctgttgactgataccgctgcagacttggcagcagccctggctgccaagcgcggtgagcaatatcccggcttcgtggaggcgacttatcgccacgccagccgcacacttaacggacatccactgcaacgtggagaggagatgggcgggttccaactcggcagttctattgtacttgtgtttgaagctccgcttggaactcacaagtccactgatgccggccggccggaaggtgcccccagtgatgggtggacctggagtattgagaagggccaacgcatcaagataggcgagaaattgggctttgtcggtgaggcgtaacgtacatgatgttgcacagcccggtgcacagccgacagcagtaggttattgcctcttgacctacatgtttgtctgtcttgtattataccagtccttctctctatgttaggatcttgatcatttagtttaatcacattttttcccccttcgatctatgtcagctcaagtgtatcagcgtgcatatttcctaatgtatcagcacaggccaggtcgtggcgtgatggtcccaaatgcgtcattgccgatcccaggctctagcgtgttgcacaagtaagaaactatgtaggctatgtagtaatgttgagggtaaagctcgggatgcgatcggcttcttgagcattcgactcgattgaaacttatgctaagtttcttaactagtatgccatgccattgatagtcttctcgggtttctagatagacggcggaaaaaggctcaacttgtgtagacgacttctctttgtataactttcgactattatatagttactgtaaggttattactagcagttaagttaggagaacgtgcattgagcgtggttgggttggaggaggatcattggtgcttctgtcgacaacactgcggccccttgctgtggcatagtggtccatcgggcccattgcatcttaggatctagaagcaatctttgcacccacgccctttttaacgtggtgatggacatttttattcgtggccttgaccttctcggccttgtcgatcgcacctagacacgttctgccaaatcttgcaatacatacatactagcatcggggatgtcaatacgaaatccgtctccttatcctggtatatccaataggatattcacggaatgctagcgccgtatctccctctcttaaaaaaaactctttaagccactcgaggtggagattgagttgactagcgaatactctattagagatataagagaaaagtgagagtgagagaagaattacaacagaaaatcgataaaaaaaagaagagatatgctctcatttcactcttcattctcactttcacttgaggtgagaaaattcacgtcgctttgcctttctattgtctggtttcggggggttgacgttgattggttgtgcatcagaatatggagacggctatcccgtgtgcgttgagttgtccatccatcgagcactggcttcggtggtcgccccctcaatcagggcgagggctccgacccaaagtcacagagcgatgctcctgggagatcaaagcctccgattgaagtgtgctgccttttggtcggaggttctcctaagcttgggcgaagggggaaattcaccactacctgagcttggattatcatgtgccagcatgtttgcaatttcttgccagccgaacacatctggggcaatctcatctctcattgccgcttaagcttcgtggcacgagatgagccccacgactaacaattagtcgagttccagcatagtttaaacgccattccaccatgacaaaaccagatgcctgctaatatatatgcatgaaactaacccatgttataaacggaaaggccgatctgtgagatccagcgcttgaacatgactcttccgagtggcgtcgtcagtccatctgccgccatttcggcagtagggatcttcatgaacttcaccgagccctctaagcccgtgaaaacggattgcaatgtttcgtatttgcatggaactcagggtttgaagcaagcgcaattgctcattgttgtcggcgtaaattggagttggtttcaccaggaagctgtcgataccaatttcagaaagtagctgtgatagccagattgcttcctgaactgctagtacttctgcgatgtattcactttctgtagtagacaacgctacacagggttgctttttcgatgtccacaagattagaccaacctccattttgaacgcaactcaagaaaatgatacttggccacatgtctcttaaaactggaggcgttaaagccctgccccagagccttcttgtctctctgctgtttaaccgtagcattttcaaggaccaatttccctcaaagtcaaggaagttaaggcgaaactccgagccatcactgaggtatccccaaatggaccaatttgactggccacgggccttttgaaatgatcttcaacaccgtcagtggtatggcatgccatgggctcaacaagaacctcatttctgctttttggcatctttgaatccatatgttcccctggagaaggagggtgttgagtatagattcgggcgttggataacgaatatggaccatataacgggagtttcgaagatcaactctgttcaaaacggaatctagacactacttttgatcagtacctgctttctatcaacccgaagaggacagtgtaatcggcggttccaatgcatgtgtactgaactccataaatggagtctcaggtgagagagtggctctgctgtgtccggtgcttggaagtatggaaggagttagcccaaaaaggactagttgactaagccgaagtttatttcaaggtttcctcccttggtgacgtatgctgtgcgcacgtgataatgcaatgactcagctttggcaaaaaggcccggagcttggatcgtccattttcggctgattgactgtcaatcagtgttgtggcgtagtcaagtaatagaatccaagaaccttggaatagctgagtttcagctgcaagtatttttgccattaatatctcatacgtcgcttaatccaatgaacacagggaagagataagaccagaactatcaacgtaggaccgccaagcttccatatctaaatcaacaattccaaccttctctccttctaactttttcacctgttcctgttcccatccacaatcttttcttgactgatggccatctttaactcgcctcgatcatttcagaatgtcaatgctattgcccaggccccaatgggcatggaccgcttcttcataggcgctcatgaaagccatcccccattctttcacctagtgctactcgtcttttcagcagtactggaagtcgtctgtgtcagcttccctggttatattgccgcccgtcagggcatatttgatgccgaagctcagaagctggtggcaaacctcaatgtcgttctgttcaccccctgccttagtatggattcttgctttcgccacatatttctatgacatagctgattgtggtcaacagtttttaccaaattgggctcacaattaaccgctgaaaagcttacggacttggctatcattccggtcatttttattgtccagactttcgtctcatacttctgttccttcattgtcgcaaaatgttgccgcttcaagaagcgacagtcaaatttcgtggctgccatggcggtacctaatgggcccttccattgagacagtcgaatatcttgttctaacgataccttctcgcaggtatttggcaattcaaactctcttcccatctcgctcgtcatatcgctctcgcagaccctcaaaggcctccactgggaccagctccccaacgacaacgatgacgaagtcgccgcacgcggtattctatacctgcttatcttccagcagcttggtcaactcgtacgctggagctggggataccacattctcttagcgcctaagcaccgatacctcgaggaggtggaacgcgacgagactggtcagtcaattatcgagcagggtcaggcgctgtatagcgacaacccggaccaaaccgatccggacgaaccgctagtcagaacacggagctcggaggatctacaccatgttcacgacgcgacaaacaccgaccgtccgttcccatccggcgaccaaacacccgtgtcaacgcgaacttattcctactcgaagatgtcccccgccccctcagacgacctggactcagacgacacaccgtcagtaattggaccaccacccaccggccccttcctcccccgccaaagctctcaaggtgacattctccacttcccggatgtcgaagtcaccgcgcgcgaagttcaagaagccgagaaaacgtgtttccagcgctgcaaagcatctctgcgtaaatctggacaacgcttgagccagtggcgagaaaagaaagctactgccctccacgcaagcctcccaccaaacgtccaaaagggcatcgcagcaaccactcgcggagcgcgccgcttcctcaatggcttatgggatttcatgaacccaccgctgtgggcaatgctagtatcaatcatcattgcctccgtcccaacgcttcagcgcctcttctttgacgacggcaccttccttcgtaactcagtcacccgggcaattgagcagaatggacaggttgccgtgccgctgatcctggtcgtgcttggcgcgaacctcgcgcgcaatacaatccccgaagaagcgctggcggacgtggaacatccccgcgacgaacgcaagcttatcatcgcttcacttgttgcgcgcatgcttcttccgactctgatcatggctccaattttggcactcatggctaagtttgtgccgatcagtattctcgacgatccgattttcattatcgtctgcttcctactgacgggtgcgccgtcagcattgcagttggcgcagatctgtcagatcaataatgtttatgttggcgctatgtctaaactcttgttccagagctatgttgtctggtatgttcttatccctcctatctatagacagacaccgtctggttgtcaatctcaattgatcattgctaacatggcttttcttccaggatcctcccctcgaccctcgtacttgtcatgtgcgctctggaggtcgtcgagtgggccgccgcttcatagactcttgtttgacgtctgaaccggaacggtgaagctggtctttccttctctagtccttttttcggggtttatattcattctctgtggacattcttataaccccattcctttttctcttttggggaattggcgttacctaaggcattattcctggcacacaaactgtacttatgaattccagtactttgaccttgctataactaacgtaatcggtaagcgaggcggccatgtaagcacgtcggccacgcaacccaacccattaatttcaaatacatttatctcaactgaaacgcccattgcttccatctgttcctaactcaacgatcctcataccatttccttggggatatatatctacccaaacagtctacacgcccaagtctgcccttattgatagcatgcgtgaaatcattatcgagtctgactgagaatatcatgaaagccctcactagctgggttcccatcagagacaccgaaaggttcatgcgtgtcgctaaagcggaatggaaagtccatcgtcgcaggaaatccccttttattctttctcgagttaaggcttcgctcgcgcgtttgtcttcgaccttatttggctattttcttcacggccaaccccactttgcactaattcgccctatgggtgtgtataccctaatgattgcaatcgaagcctagtcgtcatgcaccttgaccacgaccttgccacgcgcacgctttgtagcgatgcgctcgtaggcacctatggcatcctccatgtcgaagacagagtccacagggatacgcaagcggccctcctcgatcagacgtgctaagtagactgcatcgtcacatgtcggaggcgtgctgaacgttatatagcgacgcggcacgccgcctagccaggtgggcagccaggtgttaagcaaggcattgcgcgccatcgcatacatgccctcgaacgcgccgatatttacaacagctccctcgggctttagataagccggggagccgacaaaaagtgcttgcgtgccaacgcaatcaagcagaaagtcaaacggcttgtcgccatactgctgcgctaggtaggctggcagagattcatgctcgcggtagtcgacgaactatttgtatgttagtcacgactcatttttttatgcaacgttggataactgtgcctacctcatctgcacccagaccacgaaccatgggctcgttacctccgctagccacgccgaccaccttcgcaccacgcaccttgcacagctgcacaagcaccgaaccgactgacccgctagctccgttcacaagtaccgtgtgaccctcgcggacacccgctgtgcgaatcatcttgagcgcggtgctaccggccccgataatacccgaggccgatgccatgccaataccgccatcgatccgtgcgacctggctgccaggcagtcgcacatactctgccagcacgccgtggcccatgatcacagcgctgggaatgttctgaaaggcaatgacgtgtgagcccggatcgcgcatctctgtcggtgcacccccgccagccgctactaccacgccggaaaactcaatctccgggatccacggactggtgaaaggcagtataggcagtatcttcattatcgcctcactgctgaactgtagggacacgtgtgacacgcgaattaatacatcgggcgacgagcctgtgggcacttcgggggttggatagtcagtgaccagctcgagcgcgtcactagcaggaccgcgtcgccggcgtacccaggcacgcatggttggcgggacggtcgggagctgggtcgacgacattccttctgccattggtgcgtaggaatagatggagaagaggatgattatgatagaagcagacagaaatgctgtcgacagatccgaaagccgctgtgagaaggattgggcaattcaaggagaacaagtgactgtcgagcctctttgaggtagactgatggcacagcccgagaatgtgagaaaggtaggggttcctggaggttcgccgtacgcgtcataataaatgattggtaagaaaaagcgtgtaactaagccttaactaggtgtatcgcaatgactttgtctaatgccaccccgtttactccgtagtcaaggacttccaatgttgacggtatacgcctaggaaggccttcgatatgtgcgcttatcagaaagaaagaaagaatccatcagtcttagtttagggaatataaattccttcagtttatctccagggcaagagtgtaggtgtccatcctaagaacaaagaagtgggcgtgctcaggtgtactcaagcaaaaagcggcaaggcatgagcactaatgcggaaagagggagctatacacctgtaggtataacgtttgataaatcaatagttctagttggtttaatatcatgtcactctgctctagaactgtagcttcaatagcaagcaaataccaaggcaacagtaagaaagtcagtgaccggattattgcacattcttaaaacaacgttcaatgatgtggtcagctccgacacagaaagaccagtctaagaagtgaccggatgctggtgcaaaatggaagaacccaatcacatttccatccttaacccagattgcagatccgcaaacactatcttggagactttcggtggacccttgacccatatagcaccagcgagtcttgatccattcgaatgaaggttggctagggtcagtacagggaatttgctcacgggtgtgaggtccacagataccttcggaataaccaataagatggttattcatatagaccgtatcaccaggcttcaagctgtcagctgtgacgagacttcgtaactgggtaggttgtattccgttaaaagggctctcgaaagtgtcatttacatacgggacatcatcatgcaattttgctatcgcgatttctgtatgtgtgatcttcataatgatttgaccgatctctttaccgctagcacatggatggaaaacttcgccgccatgtggaaacccatgggaagcaacagtggtataccgctcgccggagttagagttctcaacaagtacaccagaagtagtaagatacccaggttcggtgggagaatatatactagagttcaacataacgccgggacgcagtatatcatacttgctactatcaacaatatcggcagtcggttctgtgagcctgccttgtgtcggtcgtcgtacctcctgaacaaacagataaaaacaggtacagcagcctatcgaacggggtacttcagtcaaatcagtatcctcatcctccagtacaatcataaacaaattgccccagtactggacttgggtaatagagatttgagcttccataaagaaatcgaagacgagcttgaatgcattgtcaacttgagagggtggaaggtcggtaacgttgatttcagcgtctacaaaaagacgcgatttgctcgtacgtttcattgatggcattggaccctcatcattcgggtccgttgtgaaatatggccggactcaagcaatggttagcggccacggctttgggggcagagagcccagcaaaaacaccaagaaatagctatcaaatagaatccgcttcgtgtcaggaaacagttgcataagctgagcagaatcgcggtggaaagttcgtttttcacgcaggttgaagggtagaatcacatgtctagatggtggaatcagcttccttagcatttcggtcgtcattttagaggaataggatcacaactgaagatgaggtgattatgtttgagagatgccgttggtcacgacaaagcccagctcctcgccgataaccaggttgactcgtgcgttcgggtcattaggtctagtgttgtctcaactggttgtccaacttggctccgatcgcctatcttttctcagctggcactccggcagacccagcaaaacgacagatgaaatctgcaatggtgagagataaagagtaaccttccgttctcaatggggtaatgtgagagcgacgtcaagtgctgaacaaagatccgctttttatagtaacagatcaggtaatctatactgttttacagtctagttttcaaatacgcttggcggtcaatgattccattagatcctaggagtttctacttatcagtataaaagactatgttgtacttcatcaataactgcttcaaaaactggtcctttggaatggcccttaaatgttcgcagctccgcgccggtctgggcaccccagaccgtgatggttatatttatattttgcttgacgagagctcatctcagtttctaaaggcttccatgatgctatggctacaactgcatatagcatgtcgaaccatccctcgacttctcttacattactctcacttatgaataccccaccttcgactccagacgccgttgactatataaaccaccagagaccctccccacattttcttcttcgccattcacccatctccactggagatttccttcatccatcttcccatattggatatggtgatctcagcaattccacgagaacaagaaccaacaagtgagcggaagcctgactgagagaactagacaagccaactttggcgatgtctcttcttcagcaaccgcaacggacgagagagtctacgcatctagcggaatgacaattgcaaacgatgacagcgatgaagaaagaagatttgctggattagcgactccctctcaaacgaaccaacacgtcgacttcgcatactggaggataggatatgcggactatactggttgggcgtgggcttgaccttttgctggtcgggcataggctcaacgtgttgttcgtcaggtacagactcaaggtattgggtgcccggaaggcggacaccgatgtgggtccagatcagtagataattccgctcccctcctcttctctcttttctcctctcgtgcacttcatcttagtcgaatcgatactggttgttttgctcatagcagacacaacgtagatagatcgccattacaaggtgctgctcatcaggcacggattcaacatcctccttgttaggcacggacttagcgtcctcccctcggctactgcttattggcaagcgcttgagtcatgccacaagacttccctgatgcgcgcattagaaagattgatcaaggatttacatgtcttcctatccgcatctaggattggcctcccggaatacttgactggacgtatttgcggcggaaagagctgttggtgcaaatatgccatgacgaacctgagtccagggttatggatatagcccatgtatatccagtagctggtagctacaaaacgccaatgtctgtcccatgtctgttccctcccctcgccgtattgcgcgaggttgagtctgtgtatgacgagcaggacgttgagtctatgcctgacaagccatagagatatcattctaccaatccaaaggccgaaagagcaactgcgaatacgaacccgtcaacaaattcaatacttttgctattttaggtatagtttaagtcaactgtaattgatgatgtttccccatgattcatgattacatacagcactgctagaacaagcttctaacaaagatcacggtgaaggctgaaaggtattcaagttgtagcaacgcttggctagaaagaaatgagatcgacggaagagcagcggttcctttcgcaacagttccaggttgattgaatccagaatcattactaaaaggctagtttaggattgacctagagttctaaggcacaccgcatcccgttaagcgtcgaaccgggtcatttaatgtaccgtggaccatgctgcagcttttagtgcagaagcggaacccgtagacatgaaacgaacttcatgaagaaacgttcatattgcagacaacgggaatgcggatatatcgtatagaagtctttataagtagtggcactttgcgcctaggactcagattggttcgagtaccgatcgaccaattttgtaggggtgttgttgatcttccatggggcttccccaggttctctctctggtcgtatttgcataagggaatacctgcaaatccacgtcagcagagtcaatatgagcagattctccctcaaacttactccgcgaaaaatgtaaacgtctacatcatcatttccgatcgtcctggccgcccgagattggccctcttcaccgatgaaccgaggaatctgctaacccgcagaatcttcctcgaggaccgtatcaactcaggaattcatttccatctttgctagtcggcacgttctgaaccacgggaccgagacgtcctcatgccactcccgagtgaatggtcaatttgaatgcaagactcttgctgcgcaggaatgtgtaaaatccaatcgaacatccaaaacagatgagcaactagggtctggagtgtatgtgttcacaaggctaatcccaagccaaagctaatcaactcctctcaagcaggacatgattctccgctgctagcgtgcgcagccaatcccgccggatcgccctgcacatcaatgaacatggccataccagtcatcgaatgccaaagcatatggcaatgcaaaagccaaacgccggggttatctgcccggaaacggagaacagcatagcctcgactagggatcacgactgtgtcacgcaatgcagcccgcgatgtgtcgtatagagcggaatcataattaatgttagggtcccggacgtcatccgtgtcatttttcaacgcatccgagtcgggttcttggtgtggtgggattttgtcgacgaagggattgtaggagccccagccaaattcggattggtagactgcgagtacgtagaagtggtgcccgtgcttagtggaaattagtgaattgtcgtcactggataagggagggaagggttcgtaccatgtggaaggggtgggatccttcatctaaattgttgattaccaggtctacccatataggttccggccccgtggttattgagaattgatttgcgtcccatttggctcgtggcatagacgccagtggaatgggtggatcttgctggggcttccaggtggtttggttgaagtaaccaaatggcttgttggaatatcgggccattttctggatcttggtgtacaccacgtgcgtttgttgagcggcgggcgggatggaatggagaacggagggcgcagaaggtacttctgcgatgtcgagacggtgggccttgattggaggcccctggacggcatcgggacggtagttgatggggaaagtttgatctggcgtcaatgctgggttggcgtacttgaaggaactggtgaaacattagcaactagtaactgctatgctcggcgagtttgtcatactcttcatctaactgaactgtcatgtgtgactgcttttcagatgtttgtgataatggccgaaggacaaagtctatgcgttgcccgggaaagagtgtaccgatggaatttatatgcttctgtttggagcgggccacatcgatgctatccacttgaagcaggtccagaagatggttgtcgaaaacgagattcagcccggctagagatctgtcaactagttagcgaataactaatttggctttgatgtcctgtgacatacccagtgttgaccacgcgaattcggtatgtcgcatgaggatcgaggtcgatgaatgcattattcatctgctgatcaatgcagtccaccggtctagcaggcaccgccatcatgcagttaaaataccctgccccattgatgagcatggaatcaggaacaggctaataccattgtcagatagacttctccaccatttgggaccatatcggaacttacctcgcttccaaaattcccagggtccatataccattctagaacatcacgcgcaggacgatggtaccagtccccgatgagaagcaaaagttctctatcataattgtaacggtgcagaccactgcgcccacgggatgctaagccccgaacggtggatttggaggctggtgcatgcacgaccagcccaccataaaggccatccgcccgcgagacccctgaatgggcatgataccagaaagtaccactctgatcggatggaattgtcaaattatacacaaagctacttccagaagtcacggggcattgggtaaccccggctgcaccatccatggcatctatgtgagttagcgccgatgcttccaaggtttaaatcgcgaaagacaaagcttactagccacatgaagaccatgccagtgaatcgcaatcaactcatccggcaaggcattggtaacagtgatgatcaatgtgtcaccagagcgggcctctatcgtcggtccagggaataggtctagtttgatatcctccggtcagatccaccacggtgataccaggttctgctactccgtactgaccgttgattaaatagacccgcttcaatacaccgtctggtcggcgcaagcccgaggtcacatgccaatccaagtattgagtctccggcgcccgatacgcatgatcctccgggtgaagctctatgcgcggtcgagcagtgaaagcctcatcttgaatgttttgaaggtggccgggtaaaatcaaaggcacaagaaagatgggcgattgcaaaaagtataccaagccgatcaagaaacacgcaaccaatgagcagcctgcgatcggccatggccgctgcgatggctccggcattggttgggccaatttctctggactaggggctgttttcccagccggactgtactgtttctgcattgtttgtaaagaactgggagtatcgcccaaattaccgttatatagttagaaagaaggtcaagtacggaggggaaagaacatcccgctaggacctcaggccacccttactgccggggatcaacgtgatgcgaccttacagcgagacctgcaagacacgtgcccggctggatcaatcacagcgaagggaaaataattaattgaaaagtaatttcctagggcatcgacgccataaataagggaataagacatgtactaaagggtgggtggcaccctggactaggcccaaagggtacaagatcgttcctgccgaaagtgtgttttgggttagcgttgggtcgaaccatggaacagcattcacgtggagacagctgcatatcagattggatcagcaaggcacatgtaccttttcgtccatcactcgactaacaacatgttgtatacgcatatgagtgtattattgtttatgcatgatcggcatgcttcactcaaatgccagcccatccctgtattcaaattcctcaattccgattcgttccttcctcgaacggtctgccatgaagaaaccgcgatgtaaccaaagcgtgtgggggcatcaatatgtacatacactatacacatgaaacggtacttcgcgaatctctccgctatctgcagcgtcgggggcacataagtagcgcactcttctcgcaggttaactcttccccttcattccttctgcaattaccgcatcatggctttcaaattgccggcgtctatcgcggtcgcgatagccctgggaacgggactcgtgtctggtggatctctaaaagacattgaacatgtcgtcatcttcatgcaggagaatcgctcgtgggacacggcacgttttgcctgcactatgaaacattgacatcgtgctcaccaaatcgcagtatttcggcactatgcctggagtccggggattcaatgatcccaatgtccaggtcaacccagacggaaactcggtctggaatcagtaagtgccgcctctaagggagaagttagttctaacattcctggtcagattagtcgagccggcccaatcaaacaagaccaagaccttgctaccctggtatcttggatatcaaggcggcgactggaatgatgcaattcagtgcatgtctgcgggtagcaacagctacgaggagaaccagcaatctctcaactatgggttgaacaatcactgggtgacaaacaacacaccctggagctgggggtatttgaagcggcaagatattccagttcaatttgctattgctgaaggttggacatcgggagatatgtatcaggtgcgtggcaagactcgttttcagaaattggtgactaatttacaagcaggaaagccaaatcactgccacaaatcctaatcgggttactttggtcagcggctccatcaacgttcctggtagtccccagagcaaggaccagggaggtgtttatattgacaataatgaggtaccaggtatgtatcgtcggctctctcttctgttaatatttttgatctaaccaaattataggctgtgatgacaacggtatcaactgctacccactcaagtggaagacagtctatgacttttatgaagaggcgggagtctcttggcaactctaccaagacacaaacaactttgacgacaaccctctggcttggttcgaccaatttcaaactgccccgcaaaacagttctctggctaaaaagggtatgtcgttcgtgggccttgattccttctaccaagctgccgccaacggcacattacccgaggttagtttcattgtcgggccggcggagctgtcagagcacccgccgtacatgccaaaggacggaggctggcttcagaagaaggtcgtcgatgccgtcaccagtagcccgaagtacaactcgacccttctgatgatcagctatgatgagactggtggctttggcgaccatgtcacccccttccattctcctaaggataccccgggagaatggatgcaggaccccttgggtatgttcacggatatcttcacaggacctggtttccgggtaccattctatatgatctccccctggactcgcggaaaccgtgtgttcaccgagcgggcagatcacaactcccagattctcttcgttgaggaatggttgactgcacggggatacgaaaatatcacaaccgatcagatggttgaatggagacgcaagcacatgtctaatctagtcaacgcgcttgatttgcacaatccagactactctctccccagtctccctgatgccgggaccgtggataccaacgccaagggcgagtataccggtacatctaactgccaggcacgttacaagcagacacgtccggatgttccctatggagaacagagcaacgcaacggatgtcaataccctgtggtttgaagaaggtttcaaagaggtggttggctacctcaccgagggccgatacctaacctttgagaagaatggagcagccctcacgaatccggccagaggcaacagccttgtgtccagccctgcaagccctcagcacaacaataaagcgcagcgttgggtgatccactacaacaatgacgaggaaagccagacatttaccgtctccagcgcactggatggtcgatgggtcggccccgatggtgttctgcttcccaaaagccacagcgcaaaggcagcccaagtgcatttcaccttcctaggtggtggccttggctataccatgcagtttgtggagaaggggcaatacatcgatattgacaagcacggacacttggatactgaaacccgcaagactagacctgctagtggctaccaggtcttcagcgtctctttccgtaattagatgattgtgatgtgatgacgatacggaatcttgcatgtgcatcccgagctgggaacgaaattatttatagtatcttctcatcaggcaaaagcctgaaacccaactaaatatacatattttccaataatctcctgtccacaccgcctctccaatcaagttctaaaccgagccgaagtattccataatctatgcagagataaccgtgaaaggcccagcagcgttgaacaaggtaggcatctgtataaaatcaattagcccctggagataaaccaaaaaaaaaagcaaaaaaagaaagaaaacatacctgcggcgcagtcggaagcgaagtcccaattctcaagtaccaaagcgaggcatcctcgacggcgggcaagttcttgggaatagtaacatccacaacaccggcagtctcattaataccgctcgcgatccggatagactggttgaaggagatggtgtcgaggtggcgcacggggttattgtacagccagacgttgtaggcgtcgccggggtactgagtcaacgggtccgggcagcggccggtgggcttgcggttgaagcggacgcgcacggtttggccggcggtgacggttgagttgtcggggatgccttggtagacgtttacgcaggcgtagtcgcgtttaccccaggctattgttgaggaattgttagtttaaacgttgagtatagagtcggaattgggattggaggtgcatacgctggtccttggtgaacaaggcggtgctggttcccgccagggcagcgatgattgcggcagtgaacttcatcttgggatttgagttggtggtttggtgattgatggtagaagagagagaattgtatggaaatatattcaaggtgagtcctgagaatcggcacttatataggaaataaatattttgcctgcaatatcgtgccaccgacgacataatacctgctaattatggattcgggttcggaaagccctgtctgcgaggtctgagtgatcatgtttcactcagtctctccacatcgactcgaattagaatcccgactgcttggcgtgaggagtgatcggcgtagccgatctccgtccggggaggagagtcgcaaaagtctcgtatatggtaccgagtatagtggcgtgcagttctgtgttgagcctctttcatgaatatactaggatgttggtttatttgcctaagggatgttcgttctctgcaattgtcccttgctttgtggtcacgagacaacatctgtctacagattttcagaatacattaactactagttattgagtgtttaatccacaccgtctatacggagtagctctttagatgtctcagggaaaaaagcccctataatgacgatgcggataatagtcgcctaacagccttgactattggtttgccttttcagcccaacgggtctgtttctccgcttgaatgacatctgacatctgggcagtagcccttggctgcagtaaatgtctcagaagatgcccagctgtcgctcttcataagaattatggatattgccaaagagcgcgttctgctaaatatgaggtagttaacggactatcgctcttactgcctgccgcttgctcctaggaatacgacttcagctctagcggtagacatccacaaaaatattctagacccatcgatcatgcctactggatgatctagcagcccataataaaatttgcaacccctcatttgcctaccatattctaactagcaatcagaaaatacctcattctagctaaagtctgataggacttcctaggagttctcagacatttcgtgccaccacaatgtgattggtgagatgatatagatcctaggagcttaagtgctggtacccactcgcaagagctatgagtgctaacgttgagagtcaaggtatataaaaaaacaaagagggaacccggttagtggttctaggatgcagttgataggattgtcgaaaaatcccaggccacagaggccaaagataagaccagcgaagatctcaagataggatcgtgttagtgatcccagccagcaggcgttgcttgcctgatccggacttgatgatgatgctattcccagatgacctaggagcagcgagatcgatgaaaattgatggaaattgatggagaaaccacagtaatgatgaaactgtgggtggtggcgatgatggatgatcttgaagatgcagatccaaagagaagaagaaaaggtgcagagtggaagcaaactccgcgggttagctattattaggaaatagcaaacaaccacaaaatcgtctgattatggtttaccccccagggtggtatcgcctggcagaaaaatctctgcggcaccttgacagatcgtcgagaagtgatctgaaactattcgcacatcccaaaggggaaattctcgagacttggcgagaagcgaattttccgaggatattgatagatcgtgagatcagaccaataacgaactccccgggctcataacctattaagatctacgagttagtagatgaagctacaatgtgtgttgtatgaagaagtgatggaggaaagggagagaactagtctaccccatggaagcatgtggaagcatgtgacaatgtgccgcgtgagagagttcaacaggcacgcgacactgggcccggatcggatgaggttccatggctcttacaataaggattgctagaaaaggcatagtagttttgattactatggttcgtcctaccctgtcctacctctatcaagtcccaggtctgaatttcttctttcctttctttccttttcacaaacatctctgcctttaacttactctcactcatctttcacctttactcatttctcaattctctagttatttacctctctattatctcaagtttgagccaatctgaggcaaggggacttcttactttttttcactttatactcaaatcgatttctacacatcctctattcggcactcggttaagtcacttgactatggaatcttctcagtctaaccctcctacctcgcccgactctgcaacttcacccggatccccaaaagctccatcgaaaattccaagaaggatcagctccaaaaggattgctcttcccgatttaaaatctgcactggaaagggcggttaaggccagagggaaaacatactcccaaattacggccttcgtttgttattgggacgacgacaacacttgtgctcaagaagatggagaaaccttttcccatatgatggctgatcttttcggagttaccagccaaacatttgtcataaaccacgaagatcccgttccaggctgggatttaggagatcgcctgtatcaagaagttgtgtccaaacaccgcatttgcaaaccaacgctcttcatttttttttacgctggccacggtacgatcaatcaacttaacgaactttcttttaccgcgaccaagaaggaacaatttgttccatggcgcaccatcgatcgtgaattgagttaccacacttatcctatggataccttctgcatcctagattgttgttattccggtactgctattgcgagtaacccgatgacaacccatgtcttagctgcttgtggctcttcggcatttgcgagatcccgtgtaaatggaatatcctttacacagcgagttgcgtggaccatgcgaaaactttctcactctggcaagatatctatctcgacagatgaaatttttgatacggtacagaatgaaactcctcgtggctgctacatgccaagattttcgagtcataatggggtgaatcccattgtcttacctttccacgtcacgtctacttcaactcctccttctccaggaagttcgtcttctggtcatacctcaagttcgaacctaggccctgcattacattcccgcccactatcacaatttccctccggccgcgaaactcacgtccttgttctactcgttctcgaaggaaacccgaagctggttgtccaagactttgaaaaagttgttgaaaacctgccggccaagttcaaagtgaaaatcacagatgcctatgaaaccaatgcatctgcgggagtctttgtgcgcatgacttgggaggcatatgcacgattctcgtcaagcgtagaactagacgcactacttcctgtgatcggaccatcactgattcgcacacatgagctccgcgagatttcggtccgagctggccgagaaaacattccattcagagatcggccccaggacaaggcataaactcccaatgatttcccttttttttcctttccatgtttgtacttttaattttttaattcctagcgccgaattgaagccgcttattctcaaactataagacacaacgatcatcaaggcagtgttttgcctctttataaaaagtagattggccgggagttccagagttacctaggtaccccacactttcttatcaagtctgccccgagataggattgggactagggattagtaagcttttttcaagcctgagcgctcactgagcaatatgtttttacattactagttaagcatatcctaagtgctcacagtgatcacccgtgctgtgaagtactcggtgagtaggagccctcataaaagcggcggcacccctatcgggaaattcgcgaccgtggcctaaaatccggtacaggacatatgtattgcatatgaggcttcataaatttacaagtctgcattctgaccaatatagaacgctgttctattggattctatgttgctaatttcacccgcatcctcattccatccactggcttggaggtgatctccagtgtctgaacttgttagtaacgcatatcacttctcaaggcctagacctgcaggtccgctgagtacttacattatacagctcggactcgacttcgtattgtccgttttctttttcaattggcgcacctgactcatccctcttggtggacccaagtcctactttctcccaattatatcgccgtgcggcacatgcgagaatcacaagtgcttcgatgttcgccagctcttgtccaatacagttgcggggaccacgctcaaaaggccgccaagcactggccggtatagagcctgtttccaaccagcgttggggaataaactcatcgcttttgtcaccgtacacggcatgatcacgctgtataagcttctggcagttgtatagcatcaacccatccagacacttatcttcaccattcggtaatcgaacgctcaatccagtgtttggggtggaaaatcgcgctgtcgcagctggtggatacagacgaagaatttccttgataacggcagaggtgtaggtcattctttggagagcattctctccgtgttctaggatttgatttcgaacgtaagtcgggtgcgaatcagaaccgaatatctcgtccagttctacacaaacacggcgcgaggcatgcggggttcgagctagctcgtagaatgtccattgtaataagatgcttgttgtatcatggccggcaaatagaaaagtcttgagttgatcgcaagtccggtctaacacttcgggcgttaactcgtgcgtttcgactagactgagagcaaggacactgcgagacggattttgtgaagttgactgcccctcaaacttttctttgatacgctctttgatctgcacaccaagttggcgagaaagcaacttcctctggagagggagtaataatttccatccgctgtggccggaacgataggttgagcctagtttgcggaagagtcgaacgattgcactttggttctcttctccgagttgagcgtccagatcaatatccatggtgacggcgccgataatgtcaaatgtcaaattcgtacatagttcatccagtaagaactcctcgtcagtggtcgcataatgatcgagcttcgtcaaaaaaagctgtgtcttgtccagaatacatggcagcagagtaacgaggtgcttatgggcaaatcccgggttgaactgtttgcgaaggcttttccactcttcgttctgactccaattagtatagtctagatgtacctcgaccttcaacctacttctgcaagaacaatcgacagtgggcccatcatgtcactataccagcgagatgtgtgtgactttggcggactgtatggaaacagcttggagcttttcgatatttgctctgcaacatcatgatcgcagatcacgcaaatgggatggctcactggtcgcaaatcgacaacaaatagcgccggcttgccgagagaatcatacatagctttgagagtttcgtctatcaattacagtcagttttatgttcctttcctaaatgggttttaaccgaccgatgtggatgtttggtcgatttgtcttcatgagtttgtcgagcgtggacaaatgcccccatagtagcgatggcggaagctggggcaaccaggcatattgttccgttcggtaatatgtaatttttctccagagatagaaaagaagaagtggaaggatcgtagcgactaaagtccaggccattgttgacatgaccgaataatcgtgatggaagcccgggcaagatccactcgcttgcattattattgtgctaaatatgcacttggatgacaaagattatgaagactaactcaacttactacaagagtagtcaacctttgtccttgacgataaaggatttatctgcttccagatgatatcacagatgttatatattttcccctatgttatggtatcattgaagatgaaaaacagtgtaagccccacggacgacttgtataagcaggcacatgtgcgaagcactcatagattcattcccttagttcctatttgctcgcgatacaatcaattactatacccttgcacatgcacaggacaaagtaaggggcattttaggcatctatcctgccgtattaggattagtattgttgagggcagaacagatataagaagatgcttttgcgacatgtagttgttgagaccgtttttgcctcaggttgattttgctgagcgaagctcagcaaactattaggacctacactttaccttgtttgatcttccttcttctctcttatactcagcaagcacacaatacaacccacctaggcatggtttcatttcccatcaatgattctcatttatctaactcgagttctcatttccatctttagatttctacattcgaacacatcgaaaatacgtcatccctcggtgcaaacaccaaagcctggagcatggcgaccataggcagcctttccgacatacgaaatgagatcttggggaatgacactgcgaaacgaatcgtgttcaaagtgagaactaagcatctggattctcaagactatcgcgcctcagccaacggagttatcagcgcggtttttcctggctgggaagatgacccgcgggttctgcctgtcgctgttgatgtatggcatagccgcacctacattgtcgtcgacattaaccatcttgactacgacttcaacacggcccacaaaatcaaaaaggtcttcccagtctacatactccgtcatgggaaaaagcgtggttggattcttatcagatggcctcgagaggatgagccccttggtgacaaagtcatgtatcggtacaacgtccatggttgggatgccgaaacgcctctcctagaagaccaccactcaattatcatgcatgccaatccccgcaaccttgatgagcaaccgttataaatgatgtgaagggctaccgagctctctgagttcacatgctcactgctctactgaatttcttggaggccaaatcttggagaaggatgacgagttctgtttcgtctgagaactcccgctggaaataccttgaagataatgggagtcaatatctatttctttccatatcattgttgtcttgatataccaaattatgtagtgtaatgagagaatcccaacatcatgtagctacccggtttcgattccctgaaagcgggatatataacatcaactcagactagggccatagtacggatccttcagtggaggtcgtctccaacgcttctatatcagcgatgatgatactgccgtttggggactagtgtaacagagccatatataacaagggatgggcttgcaacctgcattcatcattcacccacagccttttatccatctcgagttttctaccaaagatttctattttgaacacatccaaataccctcggtgcaaacaccaaatccgtggccatatggtgttcatagccagcatttccgatatacggaaagagatcttcgaaaatgacattacaagacgaattgtgatcagattgaggacccaaaatctggattctgaagattatcgcgtctcagcttagggatttgtcagcgatcctgcactgccctgtttattactctcgcaaaccttgtctcggacagcgctttatcaagcccatcacgggatatccattttcgtttgcgatttggtgagattgctcccagaatcggccgcaaactaaggatttcagccatttcgaagtcaaaaaagactttctggattgtagaactaattccgcggcattgggtccttatggacaacaaaaaggcggtatatctgtgagagcgactctttcatcttggctattaaggagtcttacctcatttccttgagtgccagatcgagaggctgcccacccggactcaacagtatcatatgcttgatatacgataccagcggtcgacgatttgcacctgagatgttgtgcagtagtgacagtgcggaggctggtgaagcgatgcacgcacgactggtgcaccatgcggcggatgagagttgatgaagtgaggaagttgaggacggaggagtattgatgaaagaaggaaaggcagaagggatgaaagaggagtaacaaatagggaggggttaaattgcctagaatcgatcggatcgaatcatgttagaccatgtgtctggaggggaaaagggccagaggattgtggacaaacctgggcgagagtcgacgttcgtgtccctccaatcgtgccttccgtatcctgtggtttgtccattatgaagttggtatttgggctagcctgtcgagctttgagtcgtgttggatatggtgtcgtgaagatattcagatcgttgaccttagaagtcaacctccgagcagcgctgatgtaaggataatgttgacgtcgacagatacatgtagttaggtaactaaactactgcagaatgctgcaagaggatgtcacttatctgataacgtattcttcgtaatttgcccaatattgactcaactcgcagaagaaagaacagatactctttgagaatctctctggtctctgtactgaacttactgagccggagttctatccaagccacccgcttagaaaggaaaaatgccagtattaagtatcaaagataatccaactaaccaattcgatcaatttgtctcattattgctatacaggaagtacagctacgataagagacagtctctgaaggtaagaatccaggaatagccctaggttatagaaagcttatcggaaaaaaagaaaagaaaaacaaagtccaagacgggtcttaaccacgaccgtaaggctatgttacccagtgatggtagcccctgatctacgtaaaagcaaatggggaatgatcttattccctaaaatgtacattggtaaggtgtagcctgtagggaatgcccgccccacacctactctagttgaagaccggtcaggactcagaccatgttcttttactattatacgatagccaagcatttggccagatgaagatagtttgtttaatttcctgcaaggtgtcattgtagctcacttatctgatacgagggtctgtcactattctgtagtgttccgagaacaccctggtgtatagacacaaaagcctgacgatgaccccacggcagcagttcttaatgattgcagcacggttaaaacttttcatttcctctcaccaatcatccgctcgagtcttgcagcaagcgacgctcatattccaagcgtattttgcgggccgacttgatcgtgtggcactcccgcagacacagatagaggtccagaaggtcgacggcagaggacgactttgaataaggatggctttgtaaggtgttccctgattaggaaaatgatccgcggattctgtttcttgctattgacgtatgggataaacgtgtcttcattgtcatcgacatcaatcattgctgtttccaaccggttcccttcagtccggatatcccgagacagatggaaacaggttgtctgcctgattatccaggcaccaaacagtcacctgagcgataagcatccagtttttttcgccgctttttttttatgttgtacatattcccccaccatcagggattagacacggcattttctttcgttctggtctccgttgacgctgtactttttaacattgaattccccaggtttcgtcactttggatctgtggtagcattccagggaccgcatccgattgacttgacgtctccgttcgcttgtccacccgtggttttaaggggtccaattaatttcccccacctctcccctgaaccatttcgactggacacttgtcggctagaatccgatttcgcaactggtcgcgtgcgccaaagataagccattgagcctccgtgtcttggcttacacgtgcacataccattctcaactcacaggtagggctcccgtcccctttctcgcacgttccgtgtgcgactctcgtgtagataaggaatcccaccgtatcgctctgtgttctttcaagtacaccttgcccccttttttgtaattcgactcgactctcgctccagcagcactcgaaccattggccttctttaatcctaaccatactaattcccaacagattcatctacggctcggatatcagtttgaccaaggcttgcacgcaagtggaaccgttgtcggctccccgccagacagaattgccccaaagcccattacgcaactattcaccatgccttctctggatgatctttcgactctcatacttcgcgaggaccaagaacaccccagatccgaggaagattcccagggtctattccagcaagtacacgaatggctgcaccatgagaaagccagacgacagaatcgtaaagcacgcaaagccgaagcaacctcccatgcgacaaacgagaacgagtcaaccgaagagaacgccgttttagaaagacctagctcgaacacctcgaacacctcgaacacctcggagaacaccttttccctggataaactggaaagaatcctcctccaatatgcgactgcccgacctagaagtgcactgggctcccacagacaacctgtcaaacggcagtctcggcatcgtcttagaggcctgagaagaggctcggcctccgagtctgaactcacagatgctgacggggccccgccaagcgtggaagcttccctggataatacaaagacgcttgcgtacaccggtggcactgcagtagaagagaacaccgactccagcgcgagtgtgaaacaaggaaaggatgccgaggcttgggtggttttcaagtccgagatcgtacgtcttgtacacactctgcagctgaagggctggcgcagggttcccgcggatttggcgtcagagattgaagtggtcaggctcagcggtgccctcacgaacgccgtgtatgtagttgcgccgcccaagaatctgcctccttcaaagaccgatagcaacagtctggtttcaaggaagcgcccaccgtaagcaacgaattccccccctcgcttggagacacatctaattggattacaggaagcttctcttgcgtatctacggtcctcaagtcgatcatctaatcgaccgagagaatgagctgcaaattcttcgtcgtctcggaaagaagaatattggcccacgcattctcggaaccttcactaatggccggttcgaagagtactttgaggctcgcccactcactcccaaggagctgcggatgcccgaaacggcaaggcaggttgccaagcggatgagagaattgcatgatggcgttgaacttcttgaagaagaacgcgaaggcggacctatgatcttcaagaactgggataaatgggtggaccgttgcgagcaagtgatgaactggctggataaagaaatcgaatcccctcaaaacgaggccaaagctgcatcggaaccatggcgtcgccgcggctatgtctgcggcgtaacgtgggacgtgttccgcagagccgtggataactaccgactttggctggttaacagctctggtggaatggccgagatcaagcgacagctagtgtttgcgcataatgatgtaagttcatctcttccaagtgcaccttcctgggaattttactgacttgtttagactcaatatggcaatctacttcgcatggagccggccacagagtcaccgctgcttttgcctgcaaatgaacataaacagctgatcgtcatcgactttgagtactcttcggccaatacacctggactcgagttcgccaaccactttgtaagtctaacccaactactaatccaaatggatgctaaccacaacagaccgagtggtgttacaattaccacgacgaagagcgctcatgggcttgcaacaaccgcaactacccaacgtcagaggagcagtaccatttcgtgtcgacctacctcacccaccgaccttccagttccggcgcacttatttcacctctatcctcgccgaccattcgcgctcgccctcctgttgcgctcgcaccgttggacttggacgagggttcggacagacccagctctcggctttcccaaaatgagcagtcgaaagaggctgaactcgacgccgaggtacgattcctcatgaagcagacccgaatgtggcgggcgatgaactccgcgcagtgggtagcttggggtatcgtccaggccaaggtgcctggcatggaagaaggtattgccgagatgcttgctgctcgcaacgggccaagcgacggcaatgacgatgacactaagacgccacctgcggtcgatatcgaagaagaagatgacggagactttgactacctggcttacgcacaggaccgagtcatgttcttctggggtgatctgctgtcactaaatctgatcaaaccagaggaactgcccgcgcctctactggagcacataaagtcgcggcttgtcacatactaggaggagaatatacgataatcttgacggagacttgttcatattatgaattacagagtggacgccagtacatagcactgcgtctatcggtgacttatcacacctacatgtatctactacacaatagcgttggggtttcaacatcatcatcgaataccatatcttgtcttatatcatttccaatcatctccagggtatctgaaatgccattgtagataagcagccaacatccaaccctacctccgcatctcaagcttcttccgcgtctccttcttcgcaccctcaacccactccccataagccttcccctccggatccttctccttaaccccgacaacccccttcaaaacctccccaataaacccaacaaaattacaccgtctgagcgtattctcccactgccatgccgccctcttcctctcctccctctccagcgtctccacatccccaatgtccctcgccctcccacgcggatcccgcacaacagccataagattaaaatgtgtttcgtcaggcgggtagcgcgcaatccgcctctgcagaacctcaataaccctctcgggaaactcagccgcgccgcacggaccatggctaataggatgcggctgcagcccatccaactcatacaacgtcccattaaccggtgtatacgcaatgaagtgataaacgtccgcacccttctcgtcgtcctgcggacgcgccgtctcgtcggcgaacgggctcgcgcgcgcaaagctattgtgcgcgctgcggatggcttccgagtttgacagcgcctcgccgcgcagctcgggcgggaaccccgttgtgaagtctttgaaggagcgcagctcgttgccgagctcgattgctggctgtggcgatgctgggtcgtcgtggttgaggattacggagaggatcgcttgcgtgccgcaggcgttttggatcgtctgcgccgcgaagaagagcttgtctgttgcggcagggtcgtaggttccgtctaggggggcttcggcgcgtgcgccggcggcttcacgcgtccatttgaagaggaagattacgccgtagactgtgctgtttggggttagctttgtggactggttttggttgtggagtattttattgaaattgcggggcttgggaggtttgggaggtttgtgttgcttaccctagtgcccgtatcgtgtctgcgtctagagatatgagctcttcgaattgcgtgtcttttactccaagtgtttcgatcagagaggtgaagagaccctagcttgggttactatgctgctttggatggatcgtggggttgatggtacctcgtctgactcgatggtgctccagccacctacatcagccattttgactgtctgtgatggatgctaaggatgattgaatggaagatgttgtgttgtcgatatgagcgcttgaagttgctttcttccctaaatgggaatgcggttatgtcattgtcacgtgaagactgattgtgatagctcgaagtcacgtgcgtctccaccatatcacaacgatatccacagacacgttattttacagatcgagagggccatatggcagtgataattgacttttatttctgtgccttcaagggagatctactcacaaacaaacggggcctactgccggagtgtgccagcactgcggaattcgagaatgatgatttcggcgtggaaatgctacggagagaacttgacctaaagcaaaatcacatagtgcttggtcaaatggtgaatgggtagtcactctattgacgaaaccgtagacaccgagaagcaataggatgattgagccatgaaaatcccccatgtccctgcattctgttcccctagccgcgttggatcgcggagaaaagctccctcatgtttgcaagcatccctaggatgtcgtcgaattgctttccacgctgttcgggagctgtcgttggggtcagcgcccgagctgggacgatcagctcggtatagttgtctgcgcaatgaaagaatggttagagaagttagcgtccatctcagaattgagaggcctgctattacagcatgagactgaaatggactatgacgcttttgatctttctctcaagatctagagagtgagtttgaagatagcgctatcaagagaatgataaaggtgatcatctatcattcgggagtcctcgatgacagggcacaagctgattctagcaaggctcattcttgactatccccagggcggcttctaccaagtataggcttcctgtcaccaagatctgtcctcctataccaatcatcttggcatgatcaatgccatttctgacattatgtgccatataaatggtctttgtaggccaatgctccctccagaactgggcatattcttccggccatccactcggagtggcaaaatgatcgtcatattcaatcttttcgacgaatataacatgctgaatttgcatttgtagagagttccctaacgtttttagtatatctttccagtcacgcgttcgcttcggcgaaaaatgagcaaagataagaactcggacagagctgctagtccaggccattgttagattactcactggtaattccaaagggaacttacctcgtactggccacccggttataccattttgcgactactgccatacttgtctcgttgtgtgctccgtctaaataccacgtgcagccactgtaatcgataatgtcgaagcgtcctggccagcggcacttctcaataccagctaggacatcctgtccatcgagcgagtgatcacataggtagagaaacctatgagcaatttgtatagccagcgcgcagttttctagctgttcaagtggcaggtcttcaatgtgaacgtctttaacgaattcaagcaacgtccccttaacatctctgatgaattggagtgatgagcccatttctaaagcccggcgctcaatctcgctttctacctcttgatcctgcgaaactgagagtgaaagaaccccctttttaaagattccacttttatgccatgcaatatgcttcaaggtccttcctaggttttcaacgtggtccatgccaatcttcgttatggcagtgatggcaggacgatcaacgaaatttgttgcgtcgaactgaccaccatggtgggtctcgcagataacaacgtcgacgccttcttcaatgaacgtgtggaacgccaagatggccaacatctggagaaacccaggggtcttggtatcggttggcaacgcgtcagagttgagagacaggcccctgtatacttcaaagaaacgcctggcgaagagatccactggtaatggattcgaatcaattcggattctattccgaggccacagactaggcgatgtgtacagaccgatcttccgcgtaagtccatttcttttcgcatgctcacgcaagaagcagtccacataggcgcatgtgctacctttgccttttgtgccggcgacatgaatgacattcaagcgattaatattttcggactagtatccgttagtgaattccaagtgacgaaaatatcgcacatacatcatgcccaagggttagtagccagtctctcataccaaggagaggttctgaccctttcaaggtagaagcatttggggcctttgggacacttggcgacgacgatagcgtcgccgacgaatcggggaatggccgccggcactgttgaagcaatccgattgctttctaggctcgttagaactggtatcacccacgataaataagcctacttggtatgccatgtttgacgtgggtctgcctttgttctgttgagatgtgacccttgcagtcctcgggatttgctgagacagctaaagtggttcctaaggcaacaactggagctggataatttcataagcggaggtcctggcattaggtatgtgattatggcagtagtcaactatatacggagtaactagttaactacttggtgtttaaacacccaatggtcgagtgttggttgcggaatgagatcacatgacctagaattgtcgagaaattggcaggaacggatgatcctttatccgtaggcatggctgcccaacgcgaaaccctataacagacatgaaaactctcataacggctgtcaactctattacctttccgacctgagatgatcttctcggacctccggggtcttgattgattttgtagtacgtattaccatcgtgataccgttgtcaacaagcggcccttcctcaaacatatacacaagtatatacacgagttgatgggagacaatgcgttgataggggtagggagtaaacagtacccaggtttctattaggcaggccgggaaacaaagtgtgtccgcttaaaatgtaggctgtagactgtgttgggattctaccgtgtccgccacgaattcaatagtgtatgtggtgagccgtgtggcctgtcagatctttggatcaccagatggagatttagcctccggaatctagactctggatacatcgcccaaagtctgtatcaaaatcccgctttgaccgccataaaaaagcaaatccatctggccggcctcacgcagataacaacaaccacgcagcggcaagccctgagtctggagaaccatagctaattacgatagctgcggtaacatgcaggacattagtacaatccagggatattgatcgtgcgtactaatagcagcctctttgccgcggacattccattaccgtgttgtgctgcgtctgcgaattctacaaaatccagagttacctatcgccatcaacaaggcagttcacattgggttcagattccatgagctttctcgtcaaattctttgagtgtctccttcttaccaagtctatattctcgacctgctatcgcaatacctccatcgagtctttcttggggagtgagaacgtcacaccggggcaggagatagccgcggaggtagacactttcgaacgatccacataccctcgatcactggcatacaatacaccttcgaccattaagattcaacccgttctaagtggccggtcttatccttcacctcggagttctacagcttgatatcttctcctgaaggaaccgccagcgaatataactggacatcatggcttccctttctttacaagggtatgtttccacccttggtcacgattcactgtcaatgcttatagctaagtgggcagattgatggatactaccaacgcagacacaagacctacgaatccgccccgtatcataatcctaatggagtacagagggatgttagagtgttaccccgtggctcaaactttcctacttttttatgctaagatggatgatggaacttgcaagactgtgcgtattggactatgtcggatattggaaggagacagatcgtcgtgcttgctggaccgaaatataagccgccaagcgaaacacatattgccgtctgaggagtggagtttcttggaagatcgatgtacgaggaagcgacagcggctgtaagctggtcatccgaagaatataatacccaagagatttgagttttcgtaaagaaatcgaagacaagcttaaataaactatcaacttgagatggtagaaggtgggtgacgtcgatttcagcgtctacaaaaaggcgcgatttgctcatacgtttcatcgatggcattggaccctcataattcgggttcgttgtgatatatgcttacctactccgaagagatgactagaactgggtgtcggtcgccattttagaggaacagaatcataacagtacagatgaccctatcatgctgccgagcctccatcttcaagcttaaccacggcaacgtccgtgtgtgtgagttccatgattggtttgtcaattaccctgccaggcagggaacctgtgagcagtaacagtcataaatttggagcccaaagcattttgaacaaggacacctgaggataaacgcattaactctgctttgagatttataccagagcttaaagggaagagcaaagagcatcacaatttcattaagtaatgttgaatgacctgctaatgtttgtcctgtttgataggcttcattcaactaaatcacactctcctctcttacttctcacagcaccatcacttggctggtcacagcaatacctctctgctatgatccacggccacaccggcactacactgtttgactagtgctaccgcgactgcctttaaaatcaatctcagctatgccactgctacattctagattcctagtcatattgagcaacgacagtaccgtctcttgaatcatccccagcctcttcactgcttcataccctcccacgctatatcaaccacactctcgccacactactaccagctcttctgccgcactcgatcaactacattatcgccaggatgggccggagtacccgagggtgcggagagtgcggagggtgccgccagcaaaaatatcattgccctagagattgtggctaaagagctcttcttccagctcaaagcctcagtgaggatgttcgtgggcaaccgaatcgaccgacatgcgctcgagaaaacaaccgacaaactagaggacaagagcaaacaagacaagagcgtccggatttcagaaatgagcttggaggacgtggaacagtgcctaggcatgatatggagatgaaggacgtgcagtcgctagagtctagaggtggctcaggtgacgcagatcagacgccgaagaaaagaatcgaaataatgaagcaaatatgctctatctacgtcaaccctcgtctcgagctaggagcgacaaatacacccgggaatcaagtgaaaaagaaatgaagtgagagtgagagcgaaatgagagtggactcttttttgggtcgattttatgttgttatttttttctcactctctcttttttcttgtgagtccagagaaagattgcctcaaaaaatggttggggttcacattggccagtcaactcaatctctacctcgagtggcccagaaaattttctcaagagagggaaatatggcgctagtcctacggttgaagggaacggtataaccctaccattcattctacgacatcttactagacacactaggacaaggcggagcggatttcgtgttgacatcccagatgctattgcatgatttggcggaacgtgtctggattacacttgataaggccaagaaggtcaaggtcccgaaggaaaatgcccatcaacgttaaaaaaatgggcgtctgtgccaacgatggcatattgtctatgaaattgtggtgcttttctctgtcggtcacatggaatgggataaggagcaaacgcatatgatcacaatctggcagcttcgagccagtcatctagtggtcatgtttcatacattcctgtgatgactgctgataccactccctcgtctatccgattgacgcgatcctcagacgcctcatcgcccaagccgtgctagccatccctgacaaccttaggttgccgagggtccgcgactgcgaaagctattcaaacgacaggaccgtcttatttggtgtggtcgatgccggagagtgatagagctcagcaatccctgtacgaaaagtacgaaaacggacagctatcatatttgggcccagcgaggaagaagaagcagaccgaaagaaacgaatcacacaaaagacatcgagccaggttattaagaagtctctggtttcacgagttgcaagttctacccatcccattgtgttatttctctggacatcttttctttgatcaccaaatatctccaacaagaatggcccacgacaaaatacacagatatcattgaccctggagctatacacgaccatttttatcctcggcgccaggtcaatggcatatgggagataaattattctccttattactttgtacgcattcttagatcacagtctctgtgacgatctaagaacatgcaatccaaacgcacttccgatgtctgtaccttccactcgtcgaggaagtcgcgccttcctcgaacgtaaatgagaagtatcatttgcatagtttgcaggcagagcaaatagttttcctttctctccttgtacttagtatttggtcgaaaatgcactcattctctgaactgatctagcacgtaacattctcgttctctagtccgacctctccaagctctacaacttcaccaactcaaaatatctcccccctagctccattgactctaattgcgtcccctgttccacaatgttaccttcatgcaacactataagcgtaagttagtctctgcattgtaaacagaatcgatatttgtttcttaccgtaaatacaatcggccttctgtaccgtgcttatccgatgcgcaacggcgaccgtcgttcggccttgagccgccgcattcagtgcatcctggacgaccttttcagactccgaatcgagcgcggaagtcgcctcatctaggaggaggatacgtggatcacgaagaagcgctcgcgcaatggctatttgttgttgctgtccgccagagagcatgccgcccctcgctcctatcaccgtcgagaagccgtcactgagctgggcgttagtagatatttactttaggtcagaaatagaaaagcagagccggagggtgcaagggaaaggggtggcttacggtagagatgagatgaagtcgtagatattggcatccttgcatgctttgatgattttctcctcggaaccatcctcgtcgttggttcccagggtgatattctccctaatggttccttggtatagcgtcggctcttgaataaccagagcaaggtggctcctgtagctcttgagattcaatctagaaatgtctttcccatcaaccaatgtttgacccgcttcaggatcaaagaaccgctccagcaaagcaatgatggtgctcttcccacatccactcgctcccactagacctgtgtattggcccggttgaatactcaagctcaagccgctaataaccaccctctccggtctgttggggtatcggaaataaatatttcgcaactccaagctgccttccatattcgttaacagctcgccggtttcctggcgggcgtcaatattgacaggccggtccaataacgttttaatatcctgggccccctggcgagacttgctcatatcaggcgcgaaggagaaaatagccccggcgctgaatgcgcctacgacgatagccgcataagcgatgaagaactgcaccatagaatagccttcatggattatgagacttcctccataccagaaagccagcgcgatacatagaaaattggccgactgtgaggctgcatagagcgctgatgacttgagtgttgaaaccaccgatttctgtcgctgagcttccaatatgttgtgatactctcgctgtgcatggctttcaagatttagcgatgcaaccgtcttgatggcagaacttgcctcacatgcataagttcctgaagctgtatatgccgccttcgactatcgagccatttccccgaggatcttgagtcggacgagaccacaagtaagaacaactggaatggttgcggtacaaaccagtcccagcttccaacctatcgcaatcgatacagccacgccagcaatcaaagtcgttgagacaatgaagatggagcctaaaatcacaccactcattccggcaaggttggtagcatccgtggacaacgaggatgtaagtgaaccggctgagaacttggctttgtcgaacatggaaatatcctgatagagcactcggagcagtaggcaaaacagagacccgatgctccccagcccaagaatgcagtacagcccagcatcagatacatcacactccagaagttgacattatgacgtagcttttcatgcatatcaggcggcaacgacattgccgcgattttcttgccgtagaacacggcctgtctacggaatggtcagtatcgatattctgcacagcgtgggaatagagtctagcgtgggatttccagcgcctgtgatgattgaaaataacagaccccagaccatggttagcgtttcttccttgttgaagttggcgacaaacttgatcagctcccataaggagtatttgtagtcggtctcttgctcggaatctctcccgcggtcttcggttccccgggtgctgctctacctcgtacgtatatattttagactctttgccctcgtcttttaggtcagaagctcagggtctgcttcgagggcagactttgcgtcgctgattacgatactcctttcggtcgacatgcgctgcttctccactaactcgtaatacatcgatcgtttctcaagtaggtcgttgtgggttcctggctcgacaacacgtccgtgagacataacaacaatattttctgcctcagtgatagtagataatctgaataatagtcaatttctgtctctaacactaatcgaacacataccggtgactgattgtgattgttgtccggccttccgcagcaacatcaagcgccgcctgtaccaaccgctcggcctgggcatctagagctgaagtagcctcatccagtagcaagacctttggattgctgataatagcccgtgcaatggccactcgctgtttttgtccacctgaaagtaatgagcctctttcgccaacatcagtatcgaatccatccggcaaggcggagataaattcaaaacagttcgctttctttgcggggtcaaacacaagcttttctattacagcgtgaagggagttttcgtgtccagtacctatcagaccaaacctgatattttcgaatactgtcgtggcaaagagagtgagctgttgcgtaacgatcgcgacttgttggcgtaaccattgtaaatttagagacgtgatatcgtggccatcgagcactatggtgatctcattagcacggttcattcttcacaagaaaaagcctcacatatctcgccacttattggttcataaaacctctcaatcagacccgccaatgtacttttcccacagccagaagcaccaacgatggcggtcgtctttccagctgtgttaggactagctaccagcgtatcctgaaaatggaggtt
